(19) United States
(12) Patent Application Publication
(10) Pub. No.: US 2024/0279723 A1
(43) Pub. Date: Aug. 22, 2024

(54) COMPOSITIONS AND METHODS FOR IN SITU SINGLE CELL ANALYSIS USING ENZYMATIC NUCLEIC ACID EXTENSION

(71) Applicant: NanoString Technologies, Inc., Seattle, WA (US)

(72) Inventors: Lidan WU, Seattle, WA (US); Rustem KHAFIZOV, Seattle, WA (US); Evan Paul PERILLO, Woodinville, WA (US); Dwayne DUNAWAY, Seattle, WA (US); Dae KIM, Bellevue, WA (US); Joseph M. BEECHEM, Piedmont, CA (US)

(21) Appl. No.: 18/570,190

(22) PCT Filed: Jun. 17, 2022
(86) PCT No.: PCT/US2022/033937

§ 371 Date: Dec. 14, 2023

Related U.S. Application Data
(60) Provisional application No. 63/211,666, filed on Jun. 17, 2021.

(51) Int. Cl. C12Q 1/6841; C12Q 1/48; C12Q 1/6806; C12Q 1/6874

(52) U.S. Cl. CPC C12Q 1/6841; C12Q 1/485; C12Q 1/6806; C12Q 1/6874; G01N 2333/9126

(57) ABSTRACT

The present disclosure is based in part on probes, compositions, methods, and kits for simultaneous, multiplexed spatial detection and quantification of protein and/or nucleic acid expression in a user-defined region of a tissue, user-defined cell, and/or user-defined subcellular structure within a cell.

### SEQUENCE LISTING

[0001] This application claims priority to, and the benefit of, U.S. Provisional Application No. 63/211,666, filed on Jun. 17, 2021. The contents of the aforementioned patent application are incorporated herein by reference in their entirety, for all purposes.

### SEQUENCE LISTING

[0002] The instant application contains a Sequence Listing which has been submitted in ASCII format via EFS-Web and is hereby incorporated by reference in its entirety. Said ASCII copy, created on Jun. 9, 2022, is named “NATE-052_001 WO_SeqList.txt” and is about 2,051,371 bytes in size.

### BACKGROUND OF THE INVENTION

[0003] Standard immunohistochemical and in situ hybridization methods allow for simultaneous detection of, at most, six to ten protein or nucleic acid targets, with three to four targets being typical. There exists a need for probes, compositions, methods, and kits for simultaneous, multiplexed detection and quantification of protein and/or nucleic acid expression in a user-defined region of a tissue, user-defined cell, and/or user-defined subcellular structure within a cell at a high enough resolution and with minimal background noise to do so. Furthermore, there is a need for such systems to be adaptable for use with existing sequencing technologies that are already available to a large number of end users.

### SUMMARY OF THE INVENTION

[0004] The present disclosure provides methods for in situ synthesis of a nucleic acid sequence in a tissue sample, the methods comprising: a) contacting the tissue sample with at least one probe, wherein the probe comprises a target-binding domain and a target identification domain, wherein the probe comprises a free 3′-OH moiety, and wherein the target-binding domain binds to at least one target molecule located at a first location of the tissue sample; b) contacting the tissue sample with at least one reversible terminator nucleotide, at least one polymerase, at least one caged chelator-cofactor complex, and at least one unbound caged chelator, wherein the at least one caged chelator-cofactor complex comprises at least one cofactor bound to a caged chelator; wherein the at least one reversible terminator nucleotide comprises the nucleotide operably linked to a cleavable 3′ terminator moiety; c) illuminating the first location of the tissue sample with light sufficient to uncage the at least one caged chelator-cofactor complex, thereby releasing the at least one cofactor, thereby activating the at least one polymerase, thereby ligating the at least one reversible terminator nucleotide to the free 3′-OH moiety of the at least one bound probe; d) washing the tissue sample; e) treating the tissue sample under conditions sufficient to cleave the 3′ terminator moiety of the at least one reversible terminator nucleotide ligated in step (c), thereby exposing a free 3′-OH moiety on the extended at least one bound probe; and f) repeating steps (b)-(e) until the nucleic acid sequence has been synthesized.

[0005] In some aspects of the preceding methods, a target-binding domain can bind to at least one target molecule at an at least second location of the tissue sample, and the methods can further comprise repeating steps (b)-(f) at the at least second location.

[0006] In some aspects of the preceding methods, a nucleic acid sequence synthesized at a first location of the tissue sample can be different than a nucleic acid sequence synthesized at an at least second location of the tissue sample.

[0007] The present disclosure provides methods of producing a spatially-resolved profile of the abundance of at least two target analytes in a first and an at least second location of a tissue sample comprising: a) contacting the tissue sample with a solution comprising at least two species of probes, the probes comprising a target-binding domain and a target identification domain, wherein each species of probe comprises a unique target-binding domain that binds to one of the at least two target analytes and a unique target identification domain specific for the target analyte, and a free 3′-OH moiety; b) contacting the tissue sample with a first plurality of reversible terminator nucleotides, a first plurality of polymerases, a first plurality of caged chelator-cofactor complexes, and a first plurality of unbound caged chelator, wherein at least one caged chelator-cofactor complex in the first plurality comprises at least one cofactor bound to a caged chelator; wherein at least one reversible terminator nucleotide in the first plurality comprises the nucleotide operably linked to a cleavable 3′ terminator moiety; c) illuminating at least one location of the tissue sample with light sufficient to uncage the caged chelator-cofactor complexes, thereby releasing the cofactors at the at least one location of the tissue sample, thereby activating the polymerases at the at least one location of the tissue sample, thereby ligating a reversible terminator nucleotide to the free 3′-OH moiety of at least one probe bound to a target analyte at the at least one location of the tissue sample, thereby extending the at least one bound probe; d) washing the tissue sample; e) treating the tissue sample under conditions sufficient to cleave the 3′ terminator moiety of the at least one reversible terminator nucleotide ligated in step (c), thereby exposing a free 3′-OH moiety on the extended at least one bound probe; f) repeating steps (b)-(e) until at least one probe bound to a target analyte in the first location of the tissue sample has been extended such that a first spatial barcode domain has been synthesized, wherein the first spatial barcode domain comprises a unique nucleic acid sequence specific to the first location of the tissue sample, at least one probe bound to a target analyte in the at least second location of the tissue sample has been extended such that a second spatial barcode domain has been synthesized, wherein the second spatial barcode domain comprises a unique nucleic acid sequence specific to the at least second location of the tissue sample; g) collecting the probes bound to target analytes in the tissue sample; and h) quantifying via sequencing the probes collected in step (f), thereby determining the abundance of the at least two target analytes in the first and the at least second location of the tissue sample, thereby producing a spatially-resolved profile of the abundance of the at least two target analytes.

[0008] In some aspects, the preceding methods can further comprise comparing the abundance of at least two target analytes in a first location of the tissue sample and at least two target analytes in at least a second location of the tissue sample.

[0009] In some aspects of the preceding methods, a polymerase can be a terminal deoxynucleotidyl transferase or a biologically active fragment thereof.

[0010] In some aspects of the preceding methods, a 3′ terminator moiety can be a 3′-ONH₂ group.

[0011] In some aspects of the preceding methods, a caged-chelator can be a caged divalent cation chelator. In some aspects, a caged-chelator can be 1-(4,5-Dimethoxy-2-Nitrophenyl)-1,2-Diaminoethane-N,N,N′,N′-Tetraacetic Acid (DMNP-EDTA).

[0012] In some aspects of the preceding methods, a cofactor can be a divalent metal cofactor. In some aspects of the preceding methods, a cofactor can be Co²⁺, Mg²⁺, Mn²⁺ Ca²⁺, Cd²⁺, Zn²⁺ or Fe²⁺. In some aspects of the preceding methods, a cofactor can be Co²⁺.

[0013] In some aspects of the preceding methods, contacting a tissue sample with a cofactor can comprise contacting the tissue sample with a salt form of the cofactor.

[0014] In some aspects of the preceding methods, light sufficient to uncage the caged chelator-cofactor complex can be UV light.

[0015] In some aspects of the preceding methods, treating a tissue sample under conditions sufficient to cleave a 3′ terminator moiety of an at least one reversible terminator nucleotide can comprise treating the tissue sample under acidic conditions. In some aspects of the preceding methods, treating a tissue sample under acidic conditions comprises contacting the tissue sample with a solution with a pH of about 5.5.

[0016] In some aspects of the preceding methods, a probe can further comprise a unique molecular identifier.

[0017] In some aspects of the preceding methods, a probe can further comprise an amplification primer binding site. In some aspects, an amplification primer binding site can be at least about 24 nucleotides in length.

[0018] In some aspects of the preceding methods, a probe can further comprise a constant region. In some aspects, a constant region can be at least about 12 to at least about 20 nucleotides in length.

[0019] In some aspects of the preceding methods, a probe can comprise, from 5′ to 3′, a target binding domain, followed by an amplification primer binding site, followed by a unique molecular identifier, followed by a target identification domain, followed by a constant region.

[0020] In some aspects of the preceding methods, a spatial barcode domain of at least one probe bound to a target analyte in a first location of the tissue sample comprises a unique spatial identifier sequence specific to the first location of the tissue sample. In some aspects of the preceding methods, a spatial barcode domain of at least one probe bound to a target analyte in an at least second location of the tissue sample comprises a unique spatial identifier sequence specific to the at least second location of the tissue sample.

[0021] In some aspects of the preceding methods, a spatial identifier sequence can comprise at least about 20 nucleotides. In some aspects of the preceding methods, a spatial identifier sequence can comprise at least about 28 nucleotides. In some aspects of the preceding methods, a spatial identifier sequence can comprise at least four spatial identification domains. In some aspects, the at least four spatial identification domains can comprise the same number of nucleotides. In some aspects, at least one of the at least four spatial identifications domains can comprise a different number of nucleotides as compared to another spatial identification domain within the same spatial barcode. In some aspects, each spatial identification domain can comprise about 1 to about 4 nucleotides. In some aspects, each spatial identification domain can comprise about 4 nucleotides. In some aspects, each of the at least four spatial identification domains can comprise the same nucleotide at the 3′ terminus.

[0022] In some aspects the preceding methods can further comprise, after step (f) and prior to step (g), repeating steps (b)-(e) to extend the spatial barcode domain in each location of the tissue sample such that the spatial barcode domain comprises, at the 3′ end, a delimiting domain.

[0023] In some aspects the preceding methods can further comprise, after step (f) and prior to step (g), extending the spatial barcode domain in each location of the tissue sample such that the spatial barcode domain comprises a polyT domain.

[0024] In some aspects the preceding methods can further comprise, after step (f) and prior to step (g): (i) repeating steps (b)-(e) to extend the spatial barcode domain in each location of the tissue sample such that the spatial barcode domain comprises, a delimiting domain; and (ii) extending the spatial barcode domain in each location of the tissue sample such that the spatial barcode domain comprises a polyT domain.

[0025] In some aspects of the preceding methods, a delimiting domain can be at least about 4 to at least about 6 nucleotides in length. In some aspects of the preceding methods, a sequence of a delimiting domain is the same for every spatial barcode in the sample.

[0026] In some aspects of the preceding methods, a polyT domain can comprise at least about 14 nucleotides.

[0027] In some aspects of the preceding methods, illumination can be provided by a light source selected from the group consisting of an arc-lamp, a laser, a focused UV light source, and light emitting diode. In some aspects of the preceding methods, the illumination can be UV illumination. In some aspects of the preceding methods, the illumination can be multiphoton illumination of a longer wavelength (e.g. two photon 780 nm laser).

[0028] In some aspects of the preceding methods, a first location of the tissue sample and an at least second location of the tissue sample can be subcellular. In some aspects, a first location of the tissue sample and an at least second location of the tissue sample can each comprise no more than one cell. In some aspects, a first location of the tissue sample and an at least second location of the tissue sample can each comprise no more than ten cells.

[0029] In some aspects the preceding methods, each cell within a first location of the tissue sample and an at least second location of the tissue sample can be individually automatically identified and encoded.

[0030] In some aspects the preceding methods can further comprise, prior to step (a), subjecting the tissue sample to ddTTP (dideoxthymidine-triphosphate) termination. In some aspects, subjecting a tissue sample to ddTTP termination can comprise contacting the tissue sample with ddTTP and TdT.

[0031] In some aspects the preceding methods can further comprise, after step (g) and prior to step (h), amplifying the collected probes. In some aspects, amplifying the collected probes can comprise the use of a first amplification primer and a second amplification primer, wherein the first amplification primer comprises a first flow cell adapter sequence, a first NGS index sequence and a first sequencing primer binding site, and the second amplification primer comprises a second flow cell adapter sequence, a second NGS index sequence and second sequencing primer binding site.

[0032] In some aspects of the preceding methods, at least one of the first and the second amplification primers comprises a nucleic acid sequence that is complementary to the delimiting sequence and/or the polyT domain.

[0033] Any of the above aspects can be combined with any other aspect.

[0034] Unless otherwise defined, all technical and scientific terms used herein have the same meaning as commonly understood by one of ordinary skill in the art to which this disclosure belongs. In the Specification, the singular forms also include the plural unless the context clearly dictates otherwise; as examples, the terms “a,” “an,” and “the” are understood to be singular or plural and the term “or” is understood to be inclusive. By way of example, “an element” means one or more element. Throughout the specification the word “comprising,” or variations such as “comprises” or “comprising,” will be understood to imply the inclusion of a stated element, integer or step, or group of elements, integers or steps, but not the exclusion of any other element, integer or step, or group of elements, integers or steps. About can be understood as within 10%, 9%, 8%, 7%, 6%, 5%, 4%, 3%, 2%, 1%, 0.5%, 0.1%, 0.05%, or 0.01% of the stated value. Unless otherwise clear from the context, all numerical values provided herein are modified by the term “about.”

[0035] Although methods and materials similar or equivalent to those described herein can be used in the practice or testing of the present disclosure, suitable methods and materials are described below. All publications, patent applications, patents, and other references mentioned herein are incorporated by reference in their entirety. The references cited herein are not admitted to be prior art to the claimed invention. In the case of conflict, the present Specification, including definitions, will control. In addition, the materials, methods, and examples are illustrative only and are not intended to be limiting. Other features and advantages of the disclosure will be apparent from the following detailed description and claim.

### BRIEF DESCRIPTION OF THE DRAWINGS

[0036] The above and further features will be more clearly appreciated from the following detailed description when taken in conjunction with the accompanying drawings.

[0037] FIG. 1 is an exemplary schematic of an in situ nucleic acid synthesis method of the present disclosure. In FIG. 1, a probe with a free 3′-OH, a TdT polymerase, a caged chelator-cofactor complex, reversible terminator nucleotides and unbound caged chelator are provided to a sample. Given that all of the cofactor is bound in the caged chelator-cofactor complex, there is no TdT activity, as the cofactor is required for TdT activity. In the next step, a first area is irradiated with UV light (represented by “hv” and the lightning bolt in FIG. 1), thereby releasing cofactor from the caged-chelator in the first area. The released cofactor can then bind to TdT, activating the polymerase, resulting in the addition of a reversible terminator nucleotide at the free 3′-OH of a probe located in the first location. In areas that were not exposed to UV light, the cofactor remains bound up in the caged chelator-cofactor complex, meaning that there is little to no TdT activation in those areas. Moreover, unbound caged chelator in the areas that were not exposed to UV light will chelate any cofactors that diffuse from locations that were irradiated with UV light. The entire sample is then washed to remove the reagents provided in the first step. The sample is then treated under mildly acidic conditions to cleave the 3′ terminator moiety of any reversible terminator nucleotides that were ligated onto ISH probes, thereby generating free 3′-OH groups that can be ligated to in subsequent cycles.

[0038] FIG. 2A-2Q is an exemplary schematic of the steps of the methods of producing a spatially-resolved profile of the abundance of at least one target analytes in at least two location of a tissue sample described in the present disclosure.

[0039] FIG. 2A shows an exemplary sample that can be analyzed using the methods of the present disclosure. In this non-limiting example shown in FIG. 2A-2Q, the sample comprises four cells, each cell comprising at least one copy of the specific target mRNA to be measured. Cell #1, Cell #2 and Cell #3 comprise one copy of the target mRNA and Cell #3 comprises two copies of the target mRNA.

[0040] FIG. 2B shows that the sample provided for use in the methods of the present disclosure can be subdivided into regions of interest (ROI) as shown in. In this non-limiting example, each ROI comprises one of the cells. Each ROI is pre-assigned a specific spatial barcode that is unique to that ROI. In this non-limiting example, each spatial barcode comprises 4 nucleotides, as shown in FIG. 2B.

[0041] FIG. 2C shows the first step of the methods of the present disclosure, wherein the sample is contacted with a plurality of probes, wherein the probes comprise a unique target-binding domain that binds to the target mRNA, a unique target identification domain specific for the target analyte, and a free 3′-OH moiety, as shown in the top left-hand corner of FIG. 2C.

[0042] FIG. 2D is a schematic showing the symbols used for various different reagents/molecules in FIGS. 2E-2Q, including reversible terminator nucleotides (comprising a cleavable 3′ terminator moiety), TdT polymerase, UV illumination, unbound caged chelator, caged chelator-cofactor complex, uncaged chelator, and released cofactor.

[0043] FIG. 2E shows the second step in the methods of the present disclosure, wherein the entire tissue sample is contacted with reversible terminator nucleotides, TdT polymerases, caged chelator-cofactor complexes, and unbound caged chelators. In this non-limiting example, the first reversible terminator nucleotides to be added are Adenine nucleotides (“A”).

[0044] FIG. 2F shows the third step in the methods of the present disclosure, wherein the ROI's that require the addition of an “A” nucleotide to construct the appropriate spatial barcode are illuminated with light of sufficient wavelength to uncage the caged chelator-cofactor complexes, thereby releasing cofactors. In this non-limiting example, ROI #1 require the addition of an “A” nucleotide, so ROI #1 is illuminated in this step. The illumination is represented by the lightning bolt shape in FIG. 2F. The result of this UV illumination is that, within the illuminated ROI #1, the caged chelator-cofactor complexes are uncaged, thereby releasing cofactor in ROI #1,

[0045] FIG. 2G shows that following release of the cofactor in ROI #1 (see FIG. 2F), the released cofactor binds to TdT molecules located in ROI #1, thereby activating the TdT molecules located in ROI #1.

[0046] FIG. 2H shows that the activated TdT molecules in ROI #1 will then proceed to ligate a reversible terminator nucleotide to the free 3′-OH groups of probes bound in ROI #1.

[0047] FIG. 2I shows the fourth step in the methods of the present disclosure, wherein the tissue sample is washed to remove unligated reversible terminator nucleotides, polymerases, caged chelator-cofactor complexes, unbound caged chelators, uncaged chelators, released cofactors.

[0048] FIG. 2J shows the fifth step in the methods of the present disclosure, wherein the tissue sample treated under conditions sufficient to cleave the cleavable 3′ terminator moiety of the ligated reversible terminator nucleotide, thereby exposing a free 3′-OH group on the probes bound to targets in ROI #1 for subsequent rounds of ligation.

[0049] FIG. 2K shows the next step in the methods of the present disclosure, wherein the entire tissue sample is contacted with reversible terminator nucleotides, TdT polymerases, caged chelator-cofactor complexes, and unbound caged chelators.

[0050] FIG. 2L shows the next step in the methods of the present disclosure, wherein the ROI's that require the addition of a “G” nucleotide to construct the appropriate spatial barcode are illuminated with light of sufficient wavelength to uncage the caged chelator-cofactor complexes, thereby releasing cofactors. In this non-limiting example, ROI #1 and ROI #4 require the addition of a “G” nucleotide, so ROI #1 and ROI #4 are illuminated in this step. The illumination is represented by the lightning bolt shape in FIG. 2L. The result of this UV illumination is that, within the illuminated ROI #1 and ROI #4, the caged chelator-cofactor complexes are uncaged, thereby releasing cofactor in ROI #1 and ROI #4.

[0051] FIG. 2M shows that following the release of the cofactor in ROI #1 and ROI #4 (see FIG. 2L), the released cofactor will then bind to TdT molecules located in ROI #1 and ROI #4, thereby activating the TdT molecules located in ROI #1 and ROI #4.

[0052] FIG. 2N shows that the activated TdT molecules in ROI #1 and ROI #4 will then proceed to ligate a reversible terminator nucleotide to the free 3′-OH groups of probes bound in ROI #1 and ROI #4.

[0053] FIG. 2O shows the next step in the methods of the present disclosure, wherein the tissue sample is washed to remove unligated reversible terminator nucleotides, polymerases, caged chelator-cofactor complexes, unbound caged chelators, uncaged chelators, released cofactors.

[0054] FIG. 2P shows the next step in the methods of the present disclosure, wherein the tissue sample is treated under conditions sufficient to cleave the cleavable 3′ terminator moiety of the ligated reversible terminator nucleotide, thereby exposing a free 3′-OH group on the probes bound to targets in ROI #1 and ROI #4 for subsequent rounds of ligation.

[0055] FIG. 2Q shows that the steps described in FIGS. 2A-2P can be repeated until all of the bound probes in each ROI have complete spatial barcodes.

[0056] FIG. 3A is an exemplary optical schematic of a two-photon excitation method that can be used in the methods of the present disclosure. A femtosecond pulsed (<100 fs) erbium laser emitting at 780 nm is scanned across the sample plane in a raster pattern with a pair of 2D galvanometric mirrors (1st and 2nd Scan Mirror). Digital image projection for photocleaving is generated by modulating the laser intensity at each pixel using a rapid optical shutter (acousto-optic modulator, AOM) with <100 ns rise/fall time. The output of the scanned laser is sent into a commercial EPI fluorescent microscope base and projected onto the sample with a 20× 1.0 NA water immersion objective.

[0057] FIG. 3B is an exemplary optical schematic of a two-photon excitation method that can be used in the methods of the present disclosure. A femtosecond pulsed (<100 fs) erbium laser emitting at 780 nm is scanned across the sample plane in a raster pattern with a pair of 2D galvanometric mirrors (SM1 and SM2). Digital image projection for photocleaving is generated by modulating the laser intensity at each pixel using a rapid optical shutter (acousto-optic modulator, AOM) with <100 ns rise/fall time. Polarization optics (HWP & GLP) and a negative group dispersion delay mirror pair (CMP) are used to cleanup polarization and compress the pulse at sample plane, respectively. The output of the scanned laser is sent into a commercial EPI fluorescent microscope base (Nikon Ti2) and projected onto the sample with a 40× 1.25 NA water immersion objective. The maximum field of view is 370×370 μm2, while the diffraction limited resolution is 380 nm. Achievable minimum cleaving feature resolution, measured as transition width from 10% to 90%, is less than 700 nm.

[0058] FIG. 4 is an exemplary schematic of a probe of the present disclosure, wherein the probe comprises a target binding domain, followed by an amplification primer binding site, followed by a Unique Molecular Identifier, followed by a Target Identification Domain.

[0059] FIG. 5 is an exemplary schematic of the probe of FIG. 4 that has been extended using TdT extension in the methods of the present disclosure to form a spatial barcode domain, wherein the spatial barcode domain comprises four spatial identification (ID) domains.

[0060] FIG. 6 is an exemplary schematic of the probe of FIG. 4 that has been extended using TdT extension in the methods of the present disclosure to form a spatial barcode domain, wherein the spatial barcode domain comprises four spatial identification (ID) domains and a delimiting domain.

[0061] FIG. 7 is exemplary schematic of the probe of FIG. 4 that has been extended using TdT extension in the methods of the present disclosure to form a spatial barcode domain, wherein the spatial barcode domain comprises four spatial identification (ID) domains, a delimiting domain and a polyT domain.

[0062] FIG. 8A is an exemplary schematic of an extended probe of the present disclosure, and two amplification primers of the present disclosure. The first amplification primer comprises a Flow Cell Adapter Sequence (e.g. P5), followed by an NGS Index Sequence (e.g. i5), followed by a sequencing primer binding site, followed by an amplification primer binding site that is complementary to and capable of hybridizing to the amplification primer binding site located on the probe with the spatial identifier sequence. The second amplification primer binding site comprises a polyA domain (which is capable of hybridizing to the polyT domain located on the probe), followed by a sequencing primer binding site, followed by an NGS index sequence (e.g. i7) followed by a Flow Cell Adapter Sequence (e.g. P7).

[0063] FIG. 8B is an exemplary schematic of an extended probe of the present disclosure and two amplification primers of the present disclosure. The first amplification primer comprises a Flow Cell Adapter Sequence (e.g. P5), followed by an NGS Index Sequence (e.g. i5), followed by a sequencing primer binding site, followed by an amplification primer binding site that is complementary to and capable of hybridizing to the amplification primer binding site located on the probe with the spatial identifier sequence. The second amplification primer binding site comprises two degenerate bases (“BN”) at the 3′ end, followed by a polyA domain (which is capable of hybridizing to the polyT domain located on the probe), followed by a sequencing primer binding site, followed by an NGS index sequence (e.g. i7) followed by a Flow Cell Adapter Sequence (e.g. P7).

[0064] FIG. 9 is an exemplary schematic of a probe of the present disclosure, wherein the probe comprises a target binding domain, followed by an amplification primer binding site, followed by a Unique Molecular Identifier, followed by a Target Identification Domain, followed by a constant region.

[0065] FIG. 10 is exemplary schematic of the probe of FIG. 9 that has been extended using TdT extension in the methods of the present disclosure to form a spatial barcode domain, wherein the spatial barcode domain comprises four identification (ID) domains, a delimiting domain and a polyT domain.

[0066] FIG. 11 is an exemplary schematic of a method of purifying the probes collected from a tissue sample as part of quantifying the probes via sequencing. The method comprises the use of a capture probe, wherein the capture probe comprises two copies of a sequence complementary to the amplification primer binding site present on the probe and a biotin molecule.

[0067] FIG. 12 is a series of images and graphs showing the analysis of in situ TdT-mediated nucleic acid extension performed using the methods of the present disclosure.

[0068] FIG. 13 is a graph showing the analysis of in situ TdT-mediated nucleic acid extension performed using the methods of the present disclosure. The extension was performed on a cell pellet array, as described in further detail in Example 1 below.

[0069] FIG. 14A and FIG. 14B show a series of tables depicting different experimental conditions under which in situ TdT-mediated nucleic acid extension was performed using the methods of the present disclosure.

[0070] FIG. 15 is a graph showing the analysis of in situ TdT-mediated nucleic acid extension performed using the methods of the present disclosure, as described in further detail in Example 1 below.

[0071] FIG. 16 is a graph showing the analysis of in situ TdT-mediated nucleic acid extension performed using the methods of the present disclosure, as described in further detail in Example 1 below.

### DETAILED DESCRIPTION OF THE INVENTION

[0072] The present disclosure is based in part on probes, compositions, methods, and kits for simultaneous, multiplexed spatial detection and quantification of protein and/or nucleic acid expression in a user-defined region of a tissue, user-defined cell, and/or user-defined subcellular structure within a cell using existing sequencing methods.

[0073] The present disclosure provides a comparison of the identity and abundance of target proteins and/or target nucleic acids present in a first region of interest (e.g., tissue type, a cell (including normal and abnormal cells), and a subcellular structure within a cell) and the identity and abundance of target proteins and/or target nucleic acids present in a second region of interest. There is no pre-defined upper limit to the number of regions of interest and comparisons that can be made; the upper limit relates to the size of the region of interest relative the size of the sample. As examples, when a single cell represents a region of interest, then a section may have hundreds to thousands of regions of interest; however, if a tissue section includes only two cell types, then the section may have only two regions of interest (each including only one cell type).

[0074] The present disclosure provides a higher degree of multiplexing than is possible with standard immunohistochemical or in situ hybridization methods. Standard immunohistochemical methods allow for maximal simultaneous detection of six to ten protein targets, with three to four protein targets being more typical. Similarly, in situ hybridization methods are limited to simultaneous detection of fewer than ten nucleic acid targets. The present disclosure provides detection of large combinations of nucleic acid targets and/or protein targets from a defined region of a sample. The present disclosure provides an increase in objective measurements by digital quantification and increased reliability and consistency, thereby enabling comparison of results among multiple centers.

[0075] As opposed to other methods known in the art, the methods of the present disclosure do not require sequential fluidic steps to extract probes/barcodes from specific regions of a tissue sample.

[0076] Moreover, as opposed to other methods known in the art that rely on digital micromirror-directed illumination systems, the methods of the present disclosure are compatible with two-photon illumination systems, including point scanning two-photon systems. The two-photon illumination systems exhibit increased spatial resolution, allowing the illumination of a single region of interest (ROI) that is as small as a single cell or even a subcellular structure within a single cell.

[0077] Moreover, the combination of TdT extension activation by any UV illumination system in the methods of the present disclosure can create a nonlinear effect (similar to two-photon, but chemically induced), allowing for increased spatial resolution, such that the illumination of a single region of interest (ROI) can be as small as a single cell or even a subcellular structure within a single cell.

[0078] Various compositions and methods of the present disclosure are described in full detail herein.

### Methods of the Present Disclosure

[0079] In some aspects, the methods described herein can be referred to as a “DNA writing microscope,” that can use a combination of two-photon microscopy and photo-activatable chemistry to create single-cell spatial barcodes in situ, thereby allowing for the quantification of gene-expression at single-cell resolution in a spatially resolved manner.

[0080] The present disclosure provides methods for in situ synthesis of a nucleic acid sequence in a tissue sample, the methods comprising: a) contacting the tissue sample with at least one probe, wherein the probe comprises a target-binding domain and a target identification domain, wherein the probe comprises a free 3′-OH moiety, and wherein the target-binding domain binds to at least one target molecule located at a first location of the tissue sample; b) contacting the tissue sample with at least one reversible terminator nucleotide, at least one polymerase, at least one caged chelator-cofactor complex, and at least one unbound caged chelator, wherein the at least one caged chelator-cofactor complex comprises at least one cofactor bound to a caged chelator; wherein the at least one reversible terminator nucleotide comprises the nucleotide operably linked to a cleavable 3′ terminator moiety; c) illuminating the first location of the tissue sample with light sufficient to uncage the at least one caged chelator-cofactor complex, thereby releasing the at least one cofactor, thereby activating the at least one polymerase, thereby ligating the at least one reversible terminator nucleotide to the free 3′-OH moiety of the at least one bound probe; d) washing the tissue sample; e) treating the tissue sample under conditions sufficient to cleave the 3′ terminator moiety of the at least one reversible terminator nucleotide ligated in step (c), thereby exposing a free 3′-OH moiety on the extended at least one bound probe; and f) repeating steps (b)-(e) until the nucleic acid sequence has been synthesized.

[0081] An exemplary schematic of the preceding method is shown in FIG. 1. In FIG. 1, a probe with a free 3′-OH, a TdT polymerase, a caged chelator-cofactor complex, reversible terminator nucleotides and unbound caged chelator are provided to a sample. Given that all of the cofactor is bound in the caged chelator-cofactor complex, there is no TdT activity, as the cofactor is required for TdT activity. In the next step, a first area is irradiated with UV light (represented by “hv” and the lightning bolt in FIG. 1), thereby releasing cofactor from the caged-chelator in the first area. The released cofactor can then bind to TdT, activating the polymerase, resulting in the addition of a reversible terminator nucleotide at the free 3′-OH of a probe located in the first location. In areas that were not exposed to UV light, the cofactor remains bound up in the caged chelator-cofactor complex, meaning that there is little to no TdT activation in those areas. Moreover, unbound caged chelator in the areas that were not exposed to UV light will chelate any cofactors that diffuse from locations that were irradiated with UV light. The entire sample is then washed to remove the reagents provided in the first step. The sample is then treated under mildly acidic conditions to cleave the 3′ terminator moiety of any reversible terminator nucleotides that were ligated onto ISH probes, thereby generating free 3′-OH groups that can be ligated to in subsequent cycles.

[0082] The present disclosure provides methods of producing a spatially-resolved profile of the abundance of at least two target analytes in a first and an at least second location of a tissue sample comprising: a) contacting the tissue sample with a solution comprising at least two species of probes, the probes comprising a target-binding domain and a target identification domain, wherein each species of probe comprises a unique target-binding domain that binds to one of the at least two target analytes and a unique target identification domain specific for the target analyte, and a free 3′-OH moiety; b) contacting the tissue sample with a first plurality of reversible terminator nucleotides, a first plurality of polymerases, a first plurality of caged chelator-cofactor complexes, and a first plurality of unbound caged chelator, wherein at least one caged chelator-cofactor complex in the first plurality comprises at least one cofactor bound to a caged chelator; wherein at least one reversible terminator nucleotide in the first plurality comprises the nucleotide operably linked to a cleavable 3′ terminator moiety; c) illuminating at least one location of the tissue sample with light sufficient to uncage the caged chelator-cofactor complexes, thereby releasing the cofactors at the at least one location of the tissue sample, thereby activating the polymerases at the at least one location of the tissue sample, thereby ligating a reversible terminator nucleotide to the free 3′-OH moiety of at least one probe bound to a target analyte at the at least one location of the tissue sample, thereby extending the at least one bound probe; d) washing the tissue sample; e) treating the tissue sample under conditions sufficient to cleave the 3′ terminator moiety of the at least one reversible terminator nucleotide ligated in step (c), thereby exposing a free 3′-OH moiety on the extended at least one bound probe; f) repeating steps (b)-(e) until at least one probe bound to a target analyte in the first location of the tissue sample has been extended such that a first spatial barcode domain has been synthesized, wherein the first spatial barcode domain comprises a unique nucleic acid sequence specific to the first location of the tissue sample, at least one probe bound to a target analyte in the at least second location of the tissue sample has been extended such that a second spatial barcode domain has been synthesized, wherein the second spatial barcode domain comprises a unique nucleic acid sequence specific to the at least second location of the tissue sample; g) collecting the probes bound to target analytes in the tissue sample; and h) quantifying via sequencing the probes collected in step (f), thereby determining the abundance of the at least two target analytes in the first and the at least second location of the tissue sample, thereby producing a spatially-resolved profile of the abundance of the at least two target analytes.

[0083] A schematic of a non-limiting example of the preceding method is shown in FIG. 2A-2Q. The method begins in FIG. 2A with a sample. In this non-limiting example, the sample comprises four cells, each cell comprising at least one copy of the specific target mRNA to be measured. Cell #1, Cell #2 and Cell #3 comprise one copy of the target mRNA and Cell #3 comprises two copies of the target mRNA.

[0084] The sample can be subdivided into regions of interest (ROI) as shown in FIG. 2B. In this non-limiting example, each ROI comprises one of the cells. Moreover, each ROI is pre-assigned a specific spatial barcode that is unique to that ROI. In this non-limiting example, each spatial barcode comprises 4 nucleotides. The spatial barcode for ROI #1 is AGAT, the spatial barcode for ROI #2 TATG, the spatial barcode for ROI #3 is CATT and the spatial barcode for ROI #4 is GTTA. As described further herein, the spatial barcode can comprise any number of nucleotides, and the four nucleotide spatial barcodes depicted in FIGS. 2A-2Q are for exemplary purposes only.

[0085] In a first step of the method, as shown in FIG. 2C, the sample is contacted with a plurality of probes, wherein the probes comprise a unique target-binding domain that binds to the target mRNA, a unique target identification domain specific for the target analyte, and a free 3′-OH moiety, as shown in the top left-hand corner of FIG. 2C. The target binding domain is specific for the target mRNA and hybridizes to each target mRNA within each cell. As described further herein, the sample may be contacted with a plurality of probes comprising any number of different species of probes wherein each species of probe comprises a unique target-binding domain that binds to one of the at least two target analytes and a unique target identification domain specific for the target analyte, and a free 3′-OH moiety. FIGS. 2A-2Q have a single species for probe for exemplary purposes only.

[0086] FIG. 2D is a schematic showing the symbols used for various different reagents/molecules in FIGS. 2E-2Q, including reversible terminator nucleotides (comprising a cleavable 3′ terminator moiety), TdT polymerase, UV illumination, unbound caged chelator, caged chelator-cofactor complex, uncaged chelator, and released cofactor.

[0087] In the second step of the method, shown in FIG. 2E, the entire tissue sample is contacted with reversible terminator nucleotides, TdT polymerases, caged chelator-cofactor complexes, and unbound caged chelators. In this non-limiting example, the first reversible terminator nucleotides to be added are Adenine nucleotides (“A”).

[0088] In the third step of the method, shown in FIG. 2F, the ROI's that require the addition of an “A” nucleotide to construct the appropriate spatial barcode are illuminated with light of sufficient wavelength to uncage the caged chelator-cofactor complexes, thereby releasing cofactors. In this non-limiting example, ROI #1 require the addition of an “A” nucleotide, so ROI #1 is illuminated in this step. In this non-limiting example, the light is UV light. The UV illumination is represented by the lightning bolt shape in FIG. 2F. The result of this UV illumination is that, within the illuminated ROI #1, the caged chelator-cofactor complexes are uncaged, thereby releasing cofactor in ROI #1. The released cofactor will then bind to TdT molecules located in ROI #1, thereby activating the TdT molecules located in ROI #1, as shown in FIG. 2G. The activated TdT molecules in ROI #I will then proceed to ligate a reversible terminator nucleotide to the free 3′-OH groups of probes bound in ROI #1, as shown in FIG. 2H. Without wishing to be bound by theory, the unbound caged chelators in any of the nonilluminated ROIs (ROI #2, ROI #3 and ROI #4) will chelate any released cofactor that diffuses from ROI #1, thereby preventing activation of TdT molecules (and therefore ligation) in the nonilluminated ROIs.

[0089] In the fourth step of the method, shown in FIG. 2I, the tissue sample is washed to remove unligated reversible terminator nucleotides, polymerases, caged chelator-cofactor complexes, unbound caged chelators, uncaged chelators, released cofactors.

[0090] In the fifth step of the method, as shown in FIG. 2J, the tissue sample is then treated under conditions sufficient to cleave the cleavable 3′ terminator moiety of the ligated reversible terminator nucleotide, thereby exposing a free 3′-OH group on the probes bound to targets in ROI #1 for subsequent rounds of ligation.

[0091] The method continues in FIG. 2K, wherein the entire tissue sample is contacted with reversible terminator nucleotides, TdT polymerases, caged chelator-cofactor complexes, and unbound caged chelators. In this non-limiting example, the second reversible terminator nucleotides to be added are Guanine nucleotides (“G”).

[0092] In the next step of the method, shown in FIG. 2L, the ROI's that require the addition of a “G” nucleotide to construct the appropriate spatial barcode are illuminated with light of sufficient wavelength to uncage the caged chelator-cofactor complexes, thereby releasing cofactors. In this non-limiting example, ROI #1 and ROI #4 require the addition of a “G” nucleotide, so ROI #1 and ROI #4 are illuminated in this step. The UV illumination is represented by the lightning bolt shape in FIG. 2L. The result of this UV illumination is that, within the illuminated ROI #1 and ROI #4, the caged chelator-cofactor complexes are uncaged, thereby releasing cofactor in ROI #1 and ROI #4. The released cofactor will then bind to TdT molecules located in ROI #1 and ROI #4, thereby activating the TdT molecules located in ROI #1 and ROI #4, as shown in FIG. 2M. The activated TdT molecules in ROI #1 and ROI #4 will then proceed to ligate a reversible terminator nucleotide to the free 3′-OH groups of probes bound in ROI #1 and ROI #4, as shown in FIG. 2N. Without wishing to be bound by theory, the unbound caged chelators in any of the nonilluminated ROIs (ROI #2 and ROI #3) will chelate any released cofactor that diffuses from ROI #1 and ROI #4, thereby preventing activation of TdT molecules (and therefore ligation) in the nonilluminated ROIs.

[0093] In the next step of the method, shown in FIG. 2O, the tissue sample is washed to remove unligated reversible terminator nucleotides, polymerases, caged chelator-cofactor complexes, unbound caged chelators, uncaged chelators, released cofactors.

[0094] In the next step of the method, as shown in FIG. 2P, the tissue sample is then treated under conditions sufficient to cleave the cleavable 3′ terminator moiety of the ligated reversible terminator nucleotide, thereby exposing a free 3′-OH group on the probes bound to targets in ROI #1 and ROI #4 for subsequent rounds of ligation.

[0095] The above-described steps can be repeated any number of times with any of the four nucleotides (dATP, dGTP, dTTP and dCTP) until all of the bound probes in each ROI have complete spatial barcodes, as shown in FIG. 2Q. After the completion of all of the spatial barcodes in each ROI, the bound probes can be washed from the sample, collected, and then sequenced. By sequencing the spatial barcode for each collected probe, the ROI from which that specific probe originated can be identified, allowing for the quantification of the abundance of each target mRNA within each ROI, thereby producing a spatially-resolved profile of the abundance of the target mRNA.

[0096] The order of nucleotide addition (i.e. A, then T then G) in FIGS. 2A-2Q are for exemplary purposes only. In methods of the present disclosure, nucleotides can be added to the spatial barcodes in any order and/or combination to synthesize the appropriate spatial barcodes for each ROI.

[0097] In some aspects of the methods of the present disclosure, a polymerase can be terminal deoxynucleotidyl transferase (TdT) or a portion thereof. In some aspects, the TdT can be Mus musculus TdT. In some aspects, the TdT can be the short isoform of Mus musculus TdT, which has the amino acid sequence:

(SEQ ID NO: 1)
MDPLQAVHLGPRKKRPRQLGTPVASTPYDIRFRDLVLFILEKKMGTTRRA
FLMELARRKGFRVENELSDSVTHIVAENNSGSDVLEWLQLQNIKASSELE
LLDISWLIECMGAGKPVEMMGRHQLVVNRNSSPSPVPGSQNVPAPAVKKI
SQYACQRRTTLNNYNQLFTDALDILAENDELRENEGSCLAFMRASSVLKS
LPFPITSMKDTEGIPCLGDKVKSIIEGIIEDGESSEAKAVLNDERYKSFK
LFTSVFGVGLKTAEKWFRMGFRTLSKIQSDKSLRFTQMQKAGFLYYEDLV
SCVNRPEAEAVSMLVKEAVVTFLPDALVTMTGGFRRGKMTGHDVDFLITS
PEATEDEEQQLLHKVTDFWKQQGLLLYCDILESTFEKFKQPSRKVDALDH
FQKCFLILKLDHGRVHSEKSGQQEGKGWKAIRVDLVMCPYDRRAFALLGW
TGSRQFERDLRRYATHERKMMLDNHALYDRTKRVFLEAESEEEIFAHLGL
DYIEPWERNA

[0098] In some aspects, a polymerase can comprise residues 132-510 of the short isoform of Mus musculus TdT. The amino acid sequence of residues 132-510 of the short isoform Mus musculus TdT is:

(SEQ ID NO: 2)
SPSPVPGSQNVPAPAVKKISQYACQRRTTLNNYNQLFTDALDILAENDEL
RENEGSCLAFMRASSVLKSLPFPITSMKDTEGIPCLGDKVKSIIEGIIED
GESSEAKAVLNDERYKSFKLFTSVFGVGLKTAEKWFRMGFRTLSKIQSDK
SLRFTQMQKAGFLYYEDLVSCVNRPEAEAVSMLVKEAVVTFLPDALVTMT
GGFRRGKMTGHDVDFLITSPEATEDEEQQLLHKVTDFWKQQGLLLYCDIL
ESTFEKFKQPSRKVDALDHFQKCFLILKLDHGRVHSEKSGQQEGKGWKAI
RVDLVMCPYDRRAFALLGWTGSRQFERDLRRYATHERKMMLDNHALYDRT
KRVFLEAESEEEIFAHLGLDYIEPWERNA

[0099] In some aspects, a polymerase can comprise residues 132-510 of the short isoform of Mus musculus TdT, wherein all exposed native cysteine residues have been removed, such that the cysteine at position 188 is substituted by Alanine, the cysteine at position 216 is substituted by Serine, the cysteine at position 302 is substituted by Alanine, the cysteine at position 378 is substituted by Alanine and the cysteine at position 438 is substituted by Serine. This sequence, herein referred to as “exposed Cys-less 132-510 Mus musculus TdT” has the amino acid sequence:

(SEQ ID NO: 3)
SPSPVPGSQNVPAPAVKKISQYACQRRTTLNNYNQLFTDALDILAENDEL
RENEGSALAFMRASSVLKSLPFPITSMKDTEGIPSLGDKVKSIIEGIIED
GESSEAKAVLNDERYKSFKLFTSVFGVGLKTAEKWFRMGFRTLSKIQSDK
SLRFTQMQKAGFLYYEDLVSAVNRPEAEAVSMLVKEAVVTFLPDALVTMT
GGFRRGKMTGHDVDFLITSPEATEDEEQQLLHKVTDFWKQQGLLLYADIL
ESTFEKFKQPSRKVDALDHFQKCFLILKLDHGRVHSEKSGQQEGKGWKAI
RVDLVMSPYDRRAFALLGWTGSRQFERDLRRYATHERKMMLDNHALYDRT
KRVFLEAESEEEIFAHLGLDYIEPWERNA

[0100] In some aspects, a polymerase can comprise the sequence of exposed Cys-less 132-510 Mus musculus TdT, wherein the Glutamic Acid at position 180 is replaced with a cysteine residue. This sequence, herein referred to as MmTdT180 has the amino acid sequence:

(SEQ ID NO: 4)
SPSPVPGSQNVPAPAVKKISQYACQRRTTLNNYNQLFTDALDILAENDCL
RENEGSALAFMRASSVLKSLPFPITSMKDTEGIPSLGDKVKSIIEGIIED
GESSEAKAVLNDERYKSFKLFTSVFGVGLKTAEKWFRMGFRTLSKIQSDK
SLRFTQMQKAGFLYYEDLVSAVNRPEAEAVSMLVKEAVVTFLPDALVTMT
GGFRRGKMTGHDVDFLITSPEATEDEEQQLLHKVTDFWKQQGLLLYADIL
ESTFEKFKQPSRKVDALDHFQKCFLILKLDHGRVHSEKSGQQEGKGWKAI
RVDLVMSPYDRRAFALLGWTGSRQFERDLRRYATHERKMMLDNHALYDRT
KRVFLEAESEEEIFAHLGLDYIEPWERNA

[0101] In some aspects, a polymerase can comprise the sequence of exposed Cys-less 132-510 Mus musculus TdT, wherein the Alanine at position 188 is replaced with a cysteine residue. This sequence, herein referred to as MmTdT188 has the amino acid sequence:

(SEQ ID NO: 5)
SPSPVPGSQNVPAPAVKKISQYACQRRTTLNNYNQLFTDALDILAENDEL
RENEGSCLAFMRASSVLKSLPFPITSMKDTEGIPSLGDKVKSIIEGIIED
GESSEAKAVLNDERYKSFKLFTSVFGVGLKTAEKWFRMGFRTLSKIQSDK
SLRFTQMQKAGFLYYEDLVSAVNRPEAEAVSMLVKEAVVTFLPDALVTMT
GGFRRGKMTGHDVDFLITSPEATEDEEQQLLHKVTDFWKQQGLLLYADIL
ESTFEKFKQPSRKVDALDHFQKCFLILKLDHGRVHSEKSGQQEGKGWKAI
RVDLVMSPYDRRAFALLGWTGSRQFERDLRRYATHERKMMLDNHALYDRT
KRVFLEAESEEEIFAHLGLDYIEPWERNA

[0102] In some aspects, a polymerase can comprise the sequence of exposed Cys-less 132-510 Mus musculus TdT, wherein the Threonine at position 253 is replaced with a cysteine residue. This sequence, herein referred to as MmTdT253 has the amino acid sequence:

(SEQ ID NO: 6)
SPSPVPGSQNVPAPAVKKISQYACQRRTTLNNYNQLFTDALDILAENDEL
RENEGSALAFMRASSVLKSLPFPITSMKDTEGIPSLGDKVKSIIEGIIED
GESSEAKAVLNDERYKSFKLFCSVFGVGLKTAEKWFRMGFRTLSKIQSDK
SLRFTQMQKAGFLYYEDLVSAVNRPEAEAVSMLVKEAVVTFLPDALVTMT
GGFRRGKMTGHDVDFLITSPEATEDEEQQLLHKVTDFWKQQGLLLYADIL
ESTFEKFKQPSRKVDALDHFQKCFLILKLDHGRVHSEKSGQQEGKGWKAI
RVDLVMSPYDRRAFALLGWTGSRQFERDLRRYATHERKMMLDNHALYDRT
KRVFLEAESEEEIFAHLGLDYIEPWERNA

[0103] In some aspects, a polymerase can comprise the sequence of exposed Cys-less 132-510 Mus musculus TdT, wherein the Alanine at position 302 is replaced with a cysteine residue. This sequence, herein referred to as MmTdT253 has the amino acid sequence:

(SEQ ID NO: 7)
SPSPVPGSQNVPAPAVKKISQYACQRRTTLNNYNQLFTDALDILAENDEL
RENEGSALAFMRASSVLKSLPFPITSMKDTEGIPSLGDKVKSIIEGIIED
GESSEAKAVLNDERYKSFKLFTSVFGVGLKTAEKWFRMGFRTLSKIQSDK
SLRFTQMQKAGFLYYEDLVSCVNRPEAEAVSMLVKEAVVTFLPDALVTMT
GGFRRGKMTGHDVDFLITSPEATEDEEQQLLHKVTDFWKQQGLLLYADIL
ESTFEKFKQPSRKVDALDHFQKCFLILKLDHGRVHSEKSGQQEGKGWKAI
RVDLVMSPYDRRAFALLGWTGSRQFERDLRRYATHERKMMLDNHALYDRT
KRVFLEAESEEEIFAHLGLDYIEPWERNA

[0104] In some aspects of the methods of the present disclosure, a cleavable 3′ terminator moiety can be a 3′-ONH₂ group.

[0105] In some aspects of the methods of the present disclosure, a caged-chelator can be a caged divalent cation chelator. In some aspects of the methods of the present disclosure, a caged-chelator can be 1-(4,5-Dimethoxy-2-Nitrophenyl)-1,2-Diaminoethane-N,N,N′,N′-Tetraacetic Acid (DMNP-EDTA).

[0106] In some aspects of the methods of the present disclosure, a cofactor can be a divalent metal cofactor. In some aspects of the methods of the present disclosure, a cofactor can be Co²⁺, Mg²⁺, Mn²⁺ Ca²⁺, Cd²⁺, Zn²⁺ or Fe²⁺. In some aspects of the methods of the present disclosure, a cofactor can be Co²⁺.

[0107] In some aspects of the methods of the present disclosure, contacting a tissue sample with a cofactor can comprise contacting the tissue sample with a salt form of the cofactor.

[0108] In some aspects of the methods of the present disclosure, light sufficient to uncage the caged chelator-cofactor complex can be UV light.

[0109] In some aspects of the methods of the present disclosure, treating a tissue sample under conditions sufficient to cleave a 3′ terminator moiety of an at least one reversible terminator nucleotide can comprise treating a tissue sample under acidic conditions. In some aspects, treating a tissue sample under acidic conditions comprises contacting the tissue sample with a solution with a pH of about 5.5.

[0110] In some aspects, the methods of the present disclosure can be used to produce a spatially-resolved profile of the abundance of any number of target analytes in at least about 10, or at least about 100, or at least about 1,000, or at least about 10,000, or at least about 100,000, or at least about 1,000,000, or at least about 107, or at least about 108, or at least about 109, or at least about 1010, or at least about 1011, or at least about 1012, or at least about 1013, or at least about 1014, or at least about 1015, or more locations in a tissue sample.

[0111] In some aspects, the methods of the present disclosure can be used to produce a spatially-resolved profile of the abundance of at least about three, or at least about four, or at least about five, or at least about six, or at least about seven, or at least about eight, or at least about nine, or at least about ten, or at least about 20, or at least about 30, or at least about 40, or at least about 50, or at least about 60, or at least about 70, or at least about 80, or at least about 90, or at least about 100, or at least about 250, or at least about 500, or at least about 750, or at least about 1000, or at least about 5000, or at least about 10,000, or at least about 100,000 target analytes in any number of locations in a tissue sample

[0112] In some aspects of the methods of the present disclosure, contacting a tissue sample with a solution comprising at least two species of probes can comprise contacting a tissue sample with at least about three, or at least about four, or at least about five, or at least about six, or at least about seven, or at least about eight, or at least about nine, or at least about ten, or at least about 20, or at least about 30, or at least about 40, or at least about 50, or at least about 60, or at least about 70, or at least about 80, or at least about 90, or at least about 100, or at least about 250, or at least about 500, or at least about 750, or at least about 1000, or at least about 5000, or at least about 10,000, or at least about 100,000 species of probes, the probes comprising a target-binding domain and a target identification domain, wherein each species of probe comprises a unique target-binding domain that binds to one of the at least two target analytes and a unique target identification domain specific for the target analyte, and a free 3′-OH moiety.

[0113] As used herein, the term “spatially detecting” is used in its broadest sense to refer to the identification of the presence of a specific target analyte within a specific region of interest in a sample. Spatially detecting can comprise quantifying the amount of a specific target analyte present within a specific region of interest in a sample. Spatially detecting can further comprise quantifying the relative amount of a first target analyte within a specific region of interest in a sample as compared to the amount of at least a second target analyte within a specific region of interest in a sample. Spatially detecting can also comprise quantifying the relative amount of a specific target analyte within a first region of interest in a sample compared to the amount of the same target analyte in at least a second region of interest in the same sample or different sample.

### Target Analyte

[0114] In some aspects of the methods and compositions of the present disclosure, a target analyte can be any molecule within a sample that is to be spatially detected Target analytes include, but are not limited to, nucleic acid molecules and protein molecules. When the target analyte is a protein, the protein can be referred to as a target protein. When the target analyte is a nucleic acid, the nucleic acid can be referred to as a target nucleic acid. Target nucleic acids can include, but are not limited to, mRNA molecules, microRNA (miRNA) molecules, tRNA molecules, rRNA molecules, gDNA or any other nucleic acid present within a sample.

[0115] In some aspects of the methods of the present disclosure, a target analyte is a target nucleic acid. A target nucleic acid can be DNA or RNA. A target nucleic acid can be a messenger RNA (mRNA). A target nucleic acid can be a microRNA (miRNA).

### Probes

[0116] In some aspects of the methods of the present disclosure, a probe can be a polynucleotide. In some aspects, a probe can comprise DNA, RNA or a combination of DNA and RNA. In some aspects, a probe can comprise DNA. In some aspects, a probe can be a single-stranded polynucleotide. In some aspects, a probe can be a double-stranded polynucleotide. In some aspects, a probe can be a partially single-stranded polynucleotide. In some aspects, a probe can be a partially double-stranded polynucleotide.

[0117] In some aspects of the methods of the present disclosure, a probe can comprise a target-binding domain.

[0118] The target binding domain can comprise a series of nucleotides (e.g. is a polynucleotide). The target binding domain can comprise DNA, RNA, or a combination thereof. In some aspects, the target binding domain comprises DNA. In some aspects, the target-binding domain is a single-stranded polynucleotide.

[0119] In aspects wherein the target binding domain is a polynucleotide, the target binding domain can bind directly or indirectly to a target nucleic acid. A target binding domain can bind directly to a target nucleic acid by hybridizing to a portion of the target nucleic acid that is complementary to the target binding domain of the sequencing probe.

[0120] In some aspects of the methods of the present disclosure, that target-binding domain of a probe can indirectly hybridize to a target nucleic acid present in a sample (via an intermediary oligonucleotide).

[0121] The target binding domain of the sequencing probe can be designed to control the likelihood of sequencing probe hybridization and/or de-hybridization and the rates at which these occur. Generally, the lower a probe's Tm, the faster and more likely that the probe will de-hybridize to/from a target nucleic acid. Thus, use of lower Tm probes will decrease the number of probes bound to a target nucleic acid.

[0122] The length of a target binding domain, in part, affects the likelihood of a probe hybridizing and remaining hybridized to a target nucleic acid. Generally, the longer (greater number of nucleotides) a target binding domain is, the less likely that a complementary sequence will be present in the target nucleotide. Conversely, the shorter a target binding domain is, the more likely that a complementary sequence will be present in the target nucleotide.

[0123] A target binding domain can be any number of nucleotides in length. In some aspects, a target binding domain can be at least about two, or at least about three, or at least about four, or at least about five, or at least about six, or at least about seven, or at least about eight, or at least about nine, or at least about ten, or at least about 11, or at least about 12, or at least about 13, or at least about 14, or at least about 15, or at least about 16, or at least about 17, or at least about 18, or at least about 19, or at least about 20, or at least about 21, or at least about 22, or at least about 23, or at least about 24, or at least about 25, or at least about 26, or at least about 27, or at least about 28, or at least about 29, or at least about 30, or at least about 31, or at least about 32, or at least about 33, or at least about 34, or at least about 35, or at least about 36, or at least about 37, or at least about 38, or at least about 39, or at least about 40, or at least about 41, or at least about 42, or at least about 43, or at least about 44, or at least about 45, or at least about 46, or at least about 47, or at least about 48, or at least about 49, or at least about 50 or more nucleotides in length.

[0124] Probes of the present disclosure can be used for spatially detecting a target nucleic acid. In this aspect, the target binding domain can be a target nucleic acid-binding region. The target nucleic acid-binding region is preferably at least 15 nucleotides in length, and more preferably is at least 20 nucleotides in length. In specific aspects, the target nucleic acid-binding region is approximately 10 to 500, 20 to 400, 25, 30 to 300, 35, 40 to 200, or 50 to 100 nucleotides in length. Probes and methods for binding and identifying a target nucleic acid have been described in, e.g., US2003/0013091, US2007/0166708, US2010/0015607, US2010/0261026, US2010/0262374, US2010/0112710, US2010/0047924, and US2014/0371088, each of which is incorporated herein by reference in its entirety.

[0125] The target binding domain can comprise at least one natural base. The target binding domain can comprise no natural bases. The target binding domain can comprise at least one modified nucleotide or nucleic acid analog. The target binding domain can comprise no modified nucleotides or nucleic acid analogs. The target binding domain can comprise at least one universal base. The target binding domain can comprise no universal bases. The target binding domain can comprise at least one degenerate base. The target binding domain can comprise no degenerate bases.

[0126] The target domain can comprise any combination natural bases (e.g. 0, 1, 2, 3, 4, 5, 6, 7, 8, 9, 10, or more natural bases), modified nucleotides or nucleic acid analogs (e.g. 0, 1, 2, 3, 4, 5, 6, 7, 8, 9, 10, or more modified nucleotides or nucleic acid analogs), universal bases (e.g. 0, 1, 2, 3, 4, 5, 6, 7, 8, 9, 10, or more universal bases), or degenerate bases (e.g. 0, 1, 2, 3, 4, 5, 6, 7, 8, 9, 10, or more degenerative bases). When present in a combination, the natural bases, modified nucleotides or nucleic acid analogs, universal bases and degenerate bases of a particular target binding domain can be arranged in any order.

[0127] The terms “modified nucleotides” or “nucleic acid analogues” include, but are not limited to, locked nucleic acids (LNA), bridged nucleic acids (BNA), propyne-modified nucleic acids, zip nucleic acids (ZNA®), isoguanine, isocytosine 6-amino-1-(4-hydroxy-5-hydroxy methyl-tetrahydro-furan-2-yl)-1,5-dihydro-pyrazolo[3,4-d]pyrimidin-4-one (PPG) and 2′-modified nucleic acids such as 2′-O-methyl nucleic acids. The target binding domain can include zero to six (e.g. 0, 1, 2, 3, 4, 5 or 6) modified nucleotides or nucleic acid analogues. Preferably, the modified nucleotides or nucleic acid analogues are locked nucleic acids (LNAs).

[0128] The term “locked nucleic acids (LNA)” as used herein includes, but is not limited to, a modified RNA nucleotide in which the ribose moiety comprises a methylene bridge connecting the 2′ oxygen and the 4′ carbon. This methylene bridge locks the ribose in the 3′-endo confirmation, also known as the north confirmation, that is found in A-form RNA duplexes. The term inaccessible RNA can be used interchangeably with LNA. The term “bridged nucleic acids (BNA)” as used herein includes, but is not limited to, modified RNA molecules that comprise a five-membered or six-membered bridged structure with a fixed 3′-endo confirmation, also known as the north confirmation. The bridged structure connects the 2′ oxygen of the ribose to the 4′ carbon of the ribose. Various different bridge structures are possible containing carbon, nitrogen, and hydrogen atoms. The term “propyne-modified nucleic acids” as used herein includes, but is not limited to, pyrimidines, namely cytosine and thymine/uracil, that comprise a propyne modification at the C5 position of the nucleic acid base. The term “zip nucleic acids (ZNA®)” as used herein includes, but is not limited to, oligonucleotides that are conjugated with cationic spermine moieties.

[0129] The term “universal base” as used herein includes, but is not limited to, a nucleotide base does not follow Watson-Crick base pair rules but rather can bind to any of the four canonical bases (A, T/U, C, G) located on the target nucleic acid. The term “degenerate base” as used herein includes, but is not limited to, a nucleotide base that does not follow Watson-Crick base pair rules but rather can bind to at least two of the four canonical bases A, T/U, C, G), but not all four. A degenerate base can also be termed a Wobble base; these terms are used interchangeably herein.

[0130] In some aspects, the term “degenerate base” can also be used to refer to a specific position on a nucleic acid molecule (e.g. an amplification primer, a probe, etc.) that, in the context of a plurality of the nucleic acid molecules, can independently be one or more different nucleotides on different nucleic acid molecules within said plurality. In a non-limiting example, a plurality of 4-nucleotide long nucleic acid molecules may have a degenerate base at the fourth nucleotide position, wherein the degenerate base can be either A, C or G, and wherein the nucleotides at positions 1, 2 and 3 are the same between different nucleic acid molecules. That is, within said plurality, there may be nucleic acid molecules with A at the fourth position, nucleic acid molecules with C at the fourth position, and nucleic acid molecules with G at the fourth position, while all of the nucleic acid molecules are identical at positions 1, 2 and 3.

[0131] In some aspects of the methods of the present disclosure, a probe can comprise a target identification domain.

[0132] A target identification domain is a nucleic acid molecule that identifies the target analyte bound to the target binding domain of a probe. The target identification domain comprises a unique nucleic acid sequence that identifies the target analyte bound to the target binding domain of the probe. In a non-limiting example, a probe with a target binding domain that binds to the protein P53 comprises a target identification domain with a unique nucleic acid sequence that corresponds to P53, while a probe with a target binding domain that binds to the protein P97 comprises a target identification domain with a unique nucleic acid sequence that corresponds to P97.

[0133] A target identification domain can be any number of nucleotides in length. In some aspects, a target identification domain can be at least about 12 nucleotides in length. In some aspects, a target identification domain be at least about 7 to at least about 17 nucleotides in length. In some aspects, a target identification domain be at least about 2 to at least about 22 nucleotides in length. In some aspects, a target identification domain can be at least about 2, or at least about 3, or at least about 4, or at least about 5, or at least about 6, or at least about 7, or at least about 8, or at least about 9, or at least about 10, or at least about 11, or at least about 12, or at least about 13, or at least about 14, or at least about 15, or at least about 16, or at least about 17, or at least about 18, or at least about 19, or at least about 20, or at least about 21, or at least about 22, or at least about 23, or at least about 24, or at least about 25, or at least about 26, or at least about 27, or at least about 28, or at least about 29, or at least about 30, or at least about 31, or at least about 32, or at least about 33, or at least about 34, or at least about 35, or at least about 36, or at least about 37, or at least about 38, or at least about 39 or at least about 40 nucleotides in length.

[0134] In the context of a probe, a target identification domain is a polynucleotide that comprises a nucleic acid sequence that identifies the target analyte bound to the target binding domain of that probe. That is to say, the target identification domain comprises a specific nucleic acid sequence that is a priori assigned to the specific target analyte bound to the target binding to which the target identification domain is attached. In a non-limiting example, a probe designated as “probe X” designed to spatially detect “target analyte A” comprises a target binding domain designated “target binding domain X” linked to a target identification domain “target identification domain X”. Target binding domain X binds to target analyte X′ and target identification domain X comprises a nucleic acid sequence, designated as “nucleic acid sequence X”, which corresponds to target analyte X. Thus, if a skilled artisan practicing the methods of the present disclosure were to collect probes a region of interest in sample and obtain nucleic acid sequence X after sequencing, the skilled artisan would understand that to indicate that target analyte X was present in that region of interest. The amount, or number of sequencing reads, of nucleic acid sequence X can be used to determine the quantify, in absolute or relative terms, the amount of target analyte X within the region of interest.

[0135] In some aspects of the methods of the present disclosure, a probe can comprise a unique molecular identifier (UMI).

[0136] In some aspects, a unique molecular identifier can be at least about 9 nucleotides to at least about 19 nucleotides in length. In some aspects, a unique molecular identifier can be at least about 4 nucleotides to at least about 24 nucleotides in length. In some aspects, a unique molecular identifier can be about 14 nucleotides in length. The terms unique molecular identifier and random molecular tags are used interchangeably herein. Using methods known in that art, unique molecular identifiers can be used to correct for biases in amplification prior to sequencing.

[0137] In some aspects of the methods and compositions of the present disclosure, a molecular identifier can comprise at least about 5, or at least about 10 nucleotides, or at least about 15, or at least about 20, or at least about 25, or at least about 30, or at least about 35, or at least about 40, or at least about 45, or at least about 50 nucleotides.

[0138] In some aspects of the methods of the present disclosure, a probe can comprise an amplification primer binding site. As used herein, the term “amplification primer binding site” is used in its broadest sense to refer to a nucleic acid sequence that is complementary to, or at least partially complementary to at least one amplification primer, wherein the amplification primer is a short single-stranded or partially single-stranded oligonucleotide that is sufficient to prime DNA and/or RNA synthesis, for example, by PCR.

[0139] In some aspects of the methods of the present disclosure, an amplification primer binding site can comprise at least about 5, at least about 10, at least about 15, at least about 20, at least about 25, at least about 30, at least about 35, at least about 40, at least about 45, at least about 50, at least about 55, at least about 60, at least about 65 or at least about 70 nucleotides.

[0140] In some aspects of the methods of the present disclosure, a probe can comprise a constant region. In some aspects a constant region can comprise a specific nucleic acid sequence that is the same for each location of the tissue sample.

[0141] In some aspects of the methods of the present disclosure, a constant region can be at least about 1, or at least about 2, or at least about 3, or at least about 4, or at least about 5, or at least about 6, or at least about 7, or at least about 8, or at least about 9, or at least about 10, or at least about 11, or at least about 12, or at least about 13, or at least about 14, or at least about 15, or at least about 16, or at least about 17, or at least about 18, or at least about 19, or at least about 20, or at least about 21, or at least about 22, or at least about 23, or at least about 24, or at least about 25, or at least about 26, or at least about 27, or at least about 28, or at least about 29, or at least about 30 nucleotides in length.

[0142] In some aspects of the methods of the present disclosure, a constant region can be located between a target identification domain and a free 3′-OH moiety, such that after a spatial barcode is added to the probe in situ, the constant region is located between the target identification and the extended spatial barcode. Without wishing to be bound by theory, the constant region can be used during sequence analysis to define the beginning of the spatial barcode domain.

[0143] In some aspects of the methods of the present disclosure, a probe can be a single-stranded polynucleotide comprising, from 5′ to 3′, a target-binding domain, followed by an amplification primer binding site, followed by a unique molecular identifier, followed by a target identification domain. A schematic of the aforementioned probe is shown in FIG. 4.

[0144] In some aspects of the methods of the present disclosure, a probe can be a single-stranded polynucleotide comprising, from 5′ to 3′, a target-binding domain, followed by an amplification primer binding site, followed by a unique molecular identifier, followed by a target identification domain, followed by a constant region. A schematic of the aforementioned probe is shown in FIG. 9.

[0145] In some aspects of the methods of the present disclosure a probe can be a single-stranded polynucleotide comprising, from 5′ to 3′, a target binding domain, followed by an amplification primer binding site, followed by a target identification domain, followed by a unique molecular identifier.

[0146] In aspects, probes are provided to a sample at concentrations typically less than that used for immunohistochemistry (IHC) or for in situ hybridization (ISH). Alternately, the concentration may be significantly less than that used for IHC or ISH. For example, the probe concentration may be 2-fold less, 5-fold less, 10-fold less, 20-fold less, 25-fold less, 30-fold less, 50-fold less, 60-fold less, 70-fold less, 80-fold less, 90-fold less, 100-fold less, 200-fold less, 300-fold less, 400-fold less, 500-fold less, 600-fold less, 700-fold less, 800-fold less, 900-fold less, 1000-fold less, 2000-fold less, or less and any number in between. In aspects, probes are provided at a concentration of 100 nM, 70 nM, 60 nM, 50 nM, 40 nM, 30 nM, 20 nM, 10 nM, 9 nM, 8 nM, 7 nM, 6 nM, 5 nM, 4 nM, 3 nM, 2 nM, 1 nM, 0.9 nM, 0.8 nM, 0.7 nM, 0.6 nM, 0.5 nM, 0.4 nM, 0.3 nM, 0.2 nM, 0.1 nM, 0.09 nM, 0.08 nM, 0.07 nM, 0.06 nM, 0.05 nM, 0.04 nM, 0.03 nM, 0.02 nM, 0.01 nM, and less and any concentration in between.

[0147] Background noise, during protein detection, can be reduced by performing a negative purification of the intact probe molecule. This can be done by conducting an affinity purification of the probe after collection of eluate from a region of interest.

[0148] In some aspects of the methods of the present disclosure at least one, or at least two, or at least three, or at least four, or at least five, or at least six, or at least seven, or at least eight, or at least nine, or at least ten, or at least eleven, or at least twelve, or at least thirteen, or at least fourteen, or at least fifteen, or at least sixteen, or at least seventeen, or at least eighteen, or at least nineteen, or at least twenty, or at least thirty, or at least forty, or at least fifty, or at least sixty, or at least seventy, or at least eighty, or at least ninety, or at least one hundred probes can bind to a single target analyte. As used herein, the term “tiling” is used to describe when more than one probe of the present disclosure is bound to a target analyte.

[0149] A set of probes, a plurality of probes, a solution comprising a plurality of probes can include at least one species of probes, i.e., directed to one target. A set of probes preferably includes at least two, e.g., 3, 4, 5, 6, 7, 8, 9, 10, 11, 12, 13, 14, 15, 16, 17, 18, 19 20, 30, 40, 50, 60, 70, 80, 90, 100, 200, 300, 400, 500, 600, 700, 800, 900, 1000 or more species of probes. A probe set may include one or multiple copies of each species of probe.

[0150] A first set of, a first plurality of or a first solution comprising probes only may be applied to a sample. Alternately, a second set (or higher number) of probes may be later applied to the sample. The first set and second (or higher number) may target only nucleic acids, only proteins, or a combination thereof.

[0151] In the present disclosure, two or more targets (i.e., proteins, nucleic acids, or a combination thereof) are detected; 3, 4, 5, 6, 7, 8, 9, 10, 11, 12, 13, 14, 15, 16, 17, 18, 19 20, 30, 40, 50, 60, 70, 80, 90, 100, 200, 300, 400, 500, 600, 700, 800, 900, 1000 or more targets, and any number there between, are detected.

[0152] A set of probes may be pre-defined based upon the cell type or tissue type to be targeted. For example, if the tissue is a breast cancer, then the set of probes will include probes directed to proteins relevant to breast cancer cells (e.g., Her2, EGFR, and PR) and/or probes directed to proteins relevant to normal breast tissues. Additionally, the set of probes may be pre-defined based upon developmental status of a cell or tissue to be targeted. Alternately, the set of probes may be pre-defined based upon subcellular localizations of interest, e.g., nucleus, cytoplasm, and membrane. For example, antibodies directed to Foxp3, Histone H3, or P-S6 label the nucleus, antibodies directed to CD3, CD4, PD-1, or CD45RO label the cytoplasm, and antibodies directed to PD-L1 label membranes.

### Spatial Barcode Domains

[0153] In some aspects of the methods of the present disclosure, a spatial barcode domain can comprise a spatial identifier sequence, wherein the spatial identifier sequence comprises a nucleic acid sequence that is unique to a specific location/region of interest within a tissue sample. In this way, when a probe on which a spatial barcode has been extended is collected and sequenced, the user can use the spatial identifier sequence of the spatial barcode domain to determine in what location/region of interest of the tissue sample the probe in when it was bound to its corresponding target analyte.

[0154] In some aspects, a spatial identifier sequence can comprise at least about 1, or at least about 2, or at least about 3, or at least about 4, or at least about 5, or at least about 6, or at least about 7, or at least about 8, or at least about 9, or at least about 10, or at least about 11, or at least about 12, or at least about 13, or at least about 14, or at least about 15, or at least about 16, or at least about 17, or at least about 18, or at least about 19, or at least about 20 nucleotides in length, or at least about 21, or at least about 22, or at least about 23, or at least about 24, or at least about 25, or at least about 26, or at least about 27, or at least about 28, or at least about 29, or at least about 30, or at least about 31, or at least about 32, or at least about 33, or at least about 34, or at least about 35, or at least about 36, or at least about 37, or at least about 38, or at least about 39 or at least about 40 nucleotides. In some aspects, a spatial identifier sequence can comprise at least about 20 nucleotides.

[0155] In some aspects of the methods of the present disclosure, a spatial identifier sequence can comprise at least one, at least two, at least three, at least four, at least five, at least six, at least seven, at least eight, at least nine, at least 10, at least 11, at least 12, at least 13, at least 14, at least 15, at least 16, at least 17, at least 18, at least 19 or at least 20 spatial identification domains. FIG. 5 is schematic of a probe of the present disclosure comprising a target binding domain, an amplification primer binding site, a unique molecular identifier and a target identification domain, along with a spatial barcode domain that has been synthesized by TdT extension in the methods of the present disclosure. In this non-limiting example, the spatial barcode domain comprises a spatial identifier sequence, wherein the spatial identifier sequence comprises four (#1, #2, #3 and #4) spatial identification domains.

[0156] A spatial identification domain can comprise at least about one, or at least about two, or at least about three, or at least about four, or at least about five, or at least about six, or at least about seven, or at least about eight, or at least about nine, or at least about ten, or at least about 11, or at least about 12, or at least about 13, or at least about 14, or at least about 15, or at least about 16 or at least about 17, or at least about 18, or at least about 19, or at least about 20 nucleotides. In some aspects, and spatial identification domain can comprise

[0157] In some aspects of the methods of the present disclosure, an individual spatial identification domain within a single spatial barcode domain can comprise the same number or a different number of nucleotides as compared to another individual spatial identification domain within that same single spatial barcode domain. In a non-limiting example, a spatial barcode domain may comprise four spatial identification domains, a first spatial identification domain, a second spatial identification domain, a third spatial identification domain and a fourth spatial identification domain. The first spatial identification domain may comprise two nucleotides, a second spatial identification domain may comprise three nucleotides, the third spatial identification domain may comprise two nucleotides and the fourth spatial identification domain may comprise four nucleotides. Thus, in this non-limiting example, the first spatial identification domain comprises the same number of nucleotides as the third spatial identification domain, but a different number of nucleotides as compared to the second spatial identification domain and the fourth spatial identification domain.

[0158] In some aspects of the methods of the present disclosure, each spatial identification domain within a single spatial barcode may comprise the same nucleotide at the 3′-terminus. In a non-limiting example, a spatial barcode domain may comprise four spatial identification domains, a first spatial identification domain, a second spatial identification domain, a third spatial identification domain, and fourth spatial identification domain. In this non-limiting example, each spatial identification domain comprises a “C” nucleotide at the 3′ terminus. Thus, the first spatial identification domain may comprise the nucleotide sequence 5′-ATC-3′, the second spatial identification domain may comprise the nucleotide sequence 5′-TGC-3′, the third spatial identification domain may comprise the nucleotide sequence S′-TAC-3′ and the fourth spatial identification domain may comprise the nucleotide sequence 5′-AAC-3′. Note in this non-limiting example each spatial identification domain in the spatial barcode comprises the same number of nucleotides.

[0159] In some aspects of the methods of the present disclosure, each spatial identification domain within any spatial barcode present within a sample may comprise the same nucleotide at the 3′-terminus.

[0160] In another non limiting example, a spatial barcode domain may comprise four spatial identification domains, a first spatial identification domain, a second spatial identification domain, a third spatial identification domain, and fourth spatial identification domain. In this non-limiting example, each spatial identification domain comprises a “C” nucleotide at the 3′ terminus. Thus, the first spatial identification domain may comprise the nucleotide sequence 5′-AC-3′, the second spatial identification domain may comprise the nucleotide sequence S′-GTC-3′, the third spatial identification domain may comprise the nucleotide sequence 5′-TATC-3′ and the fourth spatial identification domain may comprise the nucleotide sequence S′-AAC-3′. Note in this non-limiting example the spatial identification domains in the spatial barcode comprises differing number of nucleotides (the first spatial identification domain has two nucleotides, the second spatial identification domain has three nucleotides, the third spatial identification domain has four nucleotides, and the fourth spatial identification domain has three nucleotides) and each spatial identification domain has a “C” nucleotide at the 3′ terminus.

[0161] Without wishing to be bound by theory, whether each spatial identification domain within a spatial barcode has the same number of nucleotides or a differing number of nucleotides can determine the number of extension cycles that are needed and the number of different spatial barcodes that can be constructed, and consequently, the number of regions of interest that can be analyzed on a single tissue sample. For example, a spatial barcode domain may comprise 10 or 11 spatial identification domains, wherein each spatial identification domain comprises 1 nucleotide. This would allow for the creation of 410 to 411 unique spatial barcode sequences, meaning that 410 to 411 different regions of interest could be analyzed on a single tissue sample. In this configuration, 40-44 extensions cycles would be needed in order to construct all of the barcodes on the tissue sample. In another example, approximately 2.1 million unique spatial barcodes could be constructed if spatial identification domains could have differing numbers of nucleotides ranging from 1 nucleotide to 4 nucleotides. In this configuration, the spatial barcodes would be 7 to 28 nucleotides in total length, and only 28 extension cycles would be needed to construct all of the barcodes.

[0162] The spatial barcode domain corresponding a first location in a tissue sample may have more than, less than, or the same number of spatial identification domains as a spatial barcode domain corresponding to a second location in a tissue sample.

[0163] A spatial barcode domain can comprise a nucleic acid sequence that is specific and unique to a single location/region of interest in a tissue sample. For example, the combined nucleic acid sequence of all of the spatial identification domains within a spatial barcode domain can be specific and unique to a single location/region of interest in a tissue sample. In this way, when a probe on which a spatial barcode has been extended is collected and sequenced, the user can use the sequence of the spatial barcode domain to determine in what location/region of interest of the tissue sample the probe was located in when it was bound to its corresponding target analyte.

[0164] A spatial identification domain can comprise at least about one, or at least about two, or at least about three, or at least about four, or at least about five, or at least about six, or at least about seven, or at least about eight, or at least about nine, or at least about ten, or at least about 11, or at least about 12, or at least about 13, or at least about 14, or at least about 15, or at least about 16 or at least about 17, or at least about 18, or at least about 19, or at least about 20 nucleotides.

[0165] In some aspects of the methods of the present disclosure, the methods can further comprise, after the spatial barcode domains are synthesized in each location of the tissue sample (e.g. step (f)), repeating steps (b)-(e) to extend the spatial barcode domain in each location of the tissue sample such that the spatial barcode domain comprises, at the 3′ end, a delimiting domain.

[0166] A delimiting domain can comprise a specific nucleic acid sequence that is the same for each location of the tissue sample. A delimiting domain can be at least 1, or at least 2, or at least 3, or at least 4, or at least 5, or at least 6, or at least 7, or at least 8, or at least 9, or at least 10, or at least 11 or at least 12, or at least 13, or at least 14, or at least 15, or at least 16, or at least 17, or at least 18, or at least 19, or at least 20 nucleotides in length. A delimiting domain can comprise any nucleic acid sequence. In a non-limiting example, the delimiting domain can comprise the nucleic acid sequence “TCTC”. FIG. 6 is a schematic of the probe of FIG. 5, wherein the spatial barcode domain has been further extended by TdT synthesis to include a delimiting domain.

[0167] Without wishing to be bound by theory, the sequence of a delimiting domain can be used during sequencing analysis to define the end of the spatial barcode domain, thereby aiding in the quantification via sequencing of the collected probes.

[0168] In some aspects of the methods of the present disclosure, the methods can further comprise, after the spatial barcode domains are synthesized in each location of the tissue sample (e.g. step (f)), extending the spatial barcode domain in each location of the tissue sample such that the spatial barcode domain comprises a polyT domain or other amplification primer binding site.

[0169] In some aspects of the methods of the present disclosure, the methods can further comprise after the spatial barcode domains are synthesized in each location of the tissue sample (e.g. step (f)): (i) repeating steps (b)-(e) to extend the spatial barcode domain in each location of the tissue sample such that the spatial barcode domain comprises, a delimiting domain; and (ii) extending the spatial barcode domain in each location of the tissue sample such that the spatial barcode domain comprises a polyT domain.

[0170] FIG. 7 is a schematic of the probe of FIG. 5, wherein the spatial barcode domain has been further extended by TdT synthesis to include a delimiting domain and then further extended by TdT synthesis to include a polyT domain.

[0171] FIG. 10 is a schematic of the probe of FIG. 9, wherein the probe has been extended by TdT synthesis in the methods of the present disclosure to include a spatial barcode domain, wherein the spatial barcode domain comprises four spatial identification domains, a delimiting domain and a polyT domain.

[0172] In some aspects, a polyT domain is a polynucleotide that is comprised of only T nucleotides. In some aspects, the polyT domain can comprise at least about 1, or at least about 2, or at least about 3, or at least about 4, or at least about 5, or at least about 6, or at least about 7, or at least about 8, or at least about 9, or at least about 10, or at least about 11 or at least about 12, or at least about 13, or at least about 14, or at least about 15, or at least about 16, or at least about 17, or at least about 18, or at least about 19, or at least about 20 nucleotides, or at least about 25, or at least about 30, or at least about 35, or at least about 40, or at least about 50, or at least about 55, or at least about 60, or at least about 65, or at least about 70, or at least about 75, or at least about 80, or at least about 85, or at least about 90, or at least about 95, or at least about 100, or at least about 125, or at least about 150, or at least about 175, or at least about 200, or at least about 225, or at least about 250, or at least about 275, or at least about 300, or at least about 350, or at least about 400, or at least about 450, or at least about 500, or at least about 2000 T nucleotides. In some aspects, a polyT domain comprises more than 20 but less than 500 T nucleotides. In some aspects, a polyT domain comprises more than 20 but less than 2000 T nucleotides.

[0173] In some aspects, a polyT domain of a spatial barcode domain of a first bound probe can the same length or a different length than a polyT domain of a spatial barcode domain of a second bound probe.

[0174] In some aspects, extending the spatial barcode domain in each location of the tissue sample such that the spatial barcode domain comprises a polyT domain can comprise contacting the sample with a solution comprising dTTP and TdT.

### Amplification Methods

[0175] In some aspects of the methods of the present disclosure, quantifying via sequence can comprise amplifying the probes collected from the tissue sample.

[0176] In some aspects, amplifying the probes collected from the tissue sample can comprise amplifying the collected probes using a first amplification primer and a second amplification primer. In some aspects amplifying the probes collected from the tissue sample can comprise contacting the collected probes with a first amplification primer and a second amplification primer, wherein the first amplification primer and the second amplification primer hybridize to the collected probes. In some aspects, amplifying the probes collected from the tissue sample can comprise amplification reactions known in the art, including, but not limited to PCR.

[0177] In some aspects of the methods of the present disclosure, an amplification can comprise at least one NGS index sequence. In some aspects, the NGS index sequence is an is index sequence or an i7 index sequence. In some aspects, the NGS index sequence can be any index sequence known in the art.

[0178] In some aspects, an NGS index sequence can be at least about 1, or at least about 2, or at least about 3, or at least about 4, or at least about 5, or at least about 6, or at least about 7, or at least about 8, or at least about 9, or at least about 10, or at least about 11, or at least about 12, or at least about 13, or at least about 14, or at least about 15, or at least about 16, or at least about 17, or at least about 18, or at least about 19, or at least about 20 nucleotides in length. In some aspects, an NGS index sequence is at least about 8 nucleotides in length. In some aspects, an NGS index sequence is at least about 10 nucleotides in length.

[0179] In some aspects of the methods of the present disclosure, an amplification primer can comprise an i5 index sequence, wherein the i5 sequence comprises the sequence set forth in any one of SEQ ID NOs: 8-13 and 20-10,404, or the reverse complement thereof.

TABLE 1
Exemplary i5 index sequences

| | SEQ ID |
|---|---|
| Sequence | NO: |
| GAATGCACGA | 8 |
| AAGACTATAG | 9 |
| TCGGCAGCAA | 10 |
| CTAATGATGG | 11 |
| GGTTGCCTCT | 12 |
| CGCACATGGC | 13 |

[0180] In some aspects of the methods of the present disclosure, an amplification primer can comprise an i7 index sequence, wherein the i7 sequence comprises the sequence set forth in any one of SEQ ID NOs: 14-10,404, or the reverse complement thereof.

TABLE 2
Exemplary i7 index sequences

| | SEQ ID |
|---|---|
| Sequence | NO: |
| CGGCAATGGA | 14 |
| GCCGTAACCG | 15 |
| AACCATTCTC | 16 |
| GGTTGCCTCT | 17 |
| CTAATGATGG | 18 |
| TCGGCCTATC | 19 |

[0181] In some aspects of the methods of the present disclosure, an amplification primer can comprise a sequencing primer binding site. In some aspects, a sequencing primer binding site can be at least about 1, or at least about 2, or at least about 3, or at least about 4, or at least about 5, or at least about 6, or at least about 7, or at least about 8, or at least about 9, or at least about 10, or at least about 11, or at least about 12, or at least about 13, or at least about 14, or at least about 15, or at least about 16, or at least about 17, or at least about 18, or at least about 19, or at least about 20 nucleotides in length, or at least about 21, or at least about 22, or at least about 23, or at least about 24, or at least about 25, or at least about 26, or at least about 27, or at least about 28, or at least about 29, or at least about 30, or at least about 31, or at least about 32, or at least about 33, or at least about 34, or at least about 35, or at least about 36, or at least about 37, or at least about 38, or at least about 39 or at least about 40 nucleotides in length.

[0182] In some aspects, a sequencing primer binding site is at least about 9 nucleotides in length. In some aspects, a sequencing primer binding site is at least about 34 nucleotides in length.

[0183] In some aspects of the methods of the present disclosure, an amplification primer can comprise a flow cell adapter sequence, wherein the flow cell adapter sequence is suitable for sequencing. At least one amplification primer used in the methods of the present disclosure can comprise a P5 flow cell adapter sequence, wherein the PS flow cell adapter sequence comprises the sequence set forth in SEQ ID NO: 10,405, or the reverse complement thereof. At least one amplification primer used in the methods of the present disclosure can comprises a P7 flow cell adapter sequence, wherein the P7 flow cell adapter sequence comprises the sequence set forth in SEQ ID NO: 10,406, or the reverse complement thereof.

[0184] In some aspects, a flow cell adapter sequence can comprise between about 15 to about 40 nucleotides. A flow cell adapter sequence can comprise about 29 nucleotides. A flow cell adapter sequence can comprise about 24 nucleotides.

[0185] In some aspects of the methods and compositions of the present disclosure, a flow cell adapter sequence suitable for sequencing can comprise at least about 5, at least about 10, at least about 15, at least about 20, at least about 25, at least about 30, at least about 35 at least about 40, at least about 45, at least about 50, at least about 55, at least about 60, at least about 65, at least about 70, at least about 75, at least about 80, at least about 85, at least about 90, at least about 95 or at least about 100 nucleotides.

[0186] In some aspects, an amplification primer can comprise a poly A domain. In some aspects, a poly A domain is a polynucleotide that is comprised of only A nucleotides. In some aspects, the poly A domain can comprise at least about 1, or at least about 2, or at least about 3, or at least about 4, or at least about 5, or at least about 6, or at least about 7, or at least about 8, or at least about 9, or at least about 10, or at least about 11 or at least about 12, or at least about 13, or at least about 14, or at least about 15, or at least about 16, or at least about 17, or at least about 18, or at least about 19, or at least about 20 nucleotides, or at least about 25, or at least about 30, or at least about 35, or at least about 40 A nucleotides. In some aspects, a poly A domain can comprise at last about 32 nucleotides. In some aspects, a polyA domain can be used to hybridize a sequence probe to an extended spatial barcode domain by hybridizing the poly A domain to a polyT domain.

[0187] In some aspects, an amplification primer can comprise a degenerate base. In some aspects, an amplification primer can comprise at least about two degenerate bases. In some aspects, an amplification primer can comprise at least about three, or at least about four, or at least about five, or at least about six, or at least about seven, or at least about eight, or at least about nine, or at least about ten degenerate bases. In some aspects, the degenerate base(s) can be located at the 3′ end of an amplification primer. In some aspects, in the context of a plurality of amplification primers, a degenerate base position may have an A, a T, a C or a G nucleotide within the plurality. In some aspects, in the context of a plurality of amplification primers, a degenerate base position may have an A, a C or a G nucleotide.

[0188] FIG. 8A is an exemplary schematic of a method of amplifying the probes collected from the tissue sample as part of quantifying the probes via sequencing. In this non-limiting example, the probe has a target binding domain, followed by an amplification primer binding site, followed by a unique molecular identifier, followed by a target identification domain. In this non-limiting example, a spatial barcode has been synthesized and extended on the 3′ end of the probe. The spatial barcode domain has been synthesized by TdT extension according to the methods of the present disclosure and comprises a spatial identifier sequence comprising four (#1, #2, #3 and #4) spatial identification domains, a delimiting domain and a polyT domain. In this non-limiting example, a first amplification primer has a flow cell adapter sequence (P5), followed by an NGS index sequence (15), followed by a sequencing primer binding site, followed by a sequence that matches the amplification primer bindings site on the probe. In this non-limiting example, a second amplification primer has a polyA domain, followed by a sequencing primer binding site, followed by an NGS index sequence (17), followed by a Flow Cell Adapter sequence (P7). The amplification primers can be hybridized to the probes as shown and used to amplify the probe using standard techniques, including, but not limited to, PCR, as would be appreciated by the skilled artisan.

[0189] FIG. 8B is an exemplary schematic of a method of amplifying the probes collected from the tissue sample as part of quantifying the probes via sequencing. In this non-limiting example, the probe has a target binding domain, followed by an amplification primer binding site, followed by a unique molecular identifier, followed by a target identification domain. In this non-limiting example, a spatial barcode has been synthesized and extended on the 3′ end of the probe. The spatial barcode domain has been synthesized by TdT extension according to the methods of the present disclosure and comprises a spatial identifier sequence comprising four (#1, #2, #3 and #4) spatial identification domains, a delimiting domain and a polyT domain. In this non-limiting example, a first amplification primer has a flow cell adapter sequence (P5), followed by an NGS index sequence (15), followed by a sequencing primer binding site, followed by a sequence that matches the amplification primer bindings site on the probe. In this non-limiting example, a second amplification primer has two degenerate bases (3′-NB-5′, wherein Nis A. T. C or G and B is A, C or G), followed by a polyA domain, followed by a sequencing primer binding site, followed by an NGS index sequence (17), followed by a Flow Cell Adapter sequence (P7). The degenerate bases are located at the 3′-terminus of the second amplification primer. The amplification primers can be hybridized to the probes as shown and used to amplify the probe using standard techniques, including, but not limited to, PCR, as would be appreciated by the skilled artisan.

[0190] In some aspects of the methods of the present disclosure, an amplification primer can comprise an affinity moiety. An affinity moiety can include, but is not limited to, biotin. In aspects wherein an amplification primer comprises an affinity moiety, the affinity moiety can be used to further purify the amplified probes using a reagent that specifically binds to the affinity moiety. In some aspects wherein the affinity moiety is biotin, streptavidin-coated beads can be used to purify the amplified probes.

### Illumination Methods

[0191] In some aspects of the methods of the present disclosure, illuminating a location of a tissue sample can comprise illuminating the location using a two-photon excitation method. In some aspects, the two-photon excitation method is a two-photon excitation method using light that has a near-infrared (NIR) wavelength. In some aspects, a NIR wavelength can be about 700 to about 1000 nm. Without wishing to be bound by theory, two-photo excitation allows for improved spatial confinement and minimized excitation crosstalk as compared with one-photon excitation methods, including one-photon excitation methods at UV (300-405 nm) wavelengths. Thus, spatial barcodes can be synthesized in smaller, more defined regions of the tissue sample, increasing the spatial resolution and accuracy of the methods of the present disclosure.

[0192] In some aspects, a two-photon excitation method can be a patterned two-photon illumination method. A patterned two-photon illumination method can comprise raster scanning a point of excitation light over a sample. This raster scanning can be achieved through the use of galvanometric mirrors, micro-electro-mechanical systems (MEMS) mirrors, acousto-optic deflectors or any combination thereof. A patterned two-photon illumination method can comprise rapidly modulating a laser on and off on a per-pixel basis. Such modulating can be achieved through the use of an acousto-optic modulator, a Pockels cell or any combination thereof. In some aspects, a patterned two-photon illumination method can comprise raster scanning a point of excitation light over a sample and rapidly modulating a laser on and off on a per-pixel basis.

[0193] Exemplary optical schematics of a two-photon excitation method is shown in FIGS. 3A and 3B.

[0194] FIG. 3A is an exemplary optical schematic of a two-photon excitation method that can be used in the methods of the present disclosure. A femtosecond pulsed (<100 fs) erbium laser emitting at 780 nm is scanned across the sample plane in a raster pattern with a pair of 2D galvanometric mirrors (1st and 2nd Scan Mirror). Digital image projection for photocleaving is generated by modulating the laser intensity at each pixel using a rapid optical shutter (acousto-optic modulator, AOM) with <100 ns rise/fall time. The output of the scanned laser is sent into a commercial EPI fluorescent microscope base and projected onto the sample with a 20× 1.0 NA water immersion objective.

[0195] FIG. 3B is an exemplary optical schematic of a two-photon excitation method that can be used in the methods of the present disclosure. A femtosecond pulsed (<100 fs) erbium laser emitting at 780 nm is scanned across the sample plane in a raster pattern with a pair of 2D galvanometric mirrors (SM1 and SM2). Digital image projection for photocleaving is generated by modulating the laser intensity at each pixel using a rapid optical shutter (acousto-optic modulator, AOM) with <100 ns rise/fall time. Polarization optics (HWP & GLP) and a negative group dispersion delay mirror pair (CMP) are used to cleanup polarization and compress the pulse at sample plane, respectively. The output of the scanned laser is sent into a commercial EPI fluorescent microscope base (Nikon Ti2) and projected onto the sample with a 40× 1.25 NA water immersion objective. The maximum field of view is 370×370 μm2, while the diffraction limited resolution is 380 nm. Achievable minimum cleaving feature resolution, measured as transition width from 10% to 90%, is less than 700 nm.

[0196] In some aspects of the methods of the present disclosure, a two-photon excitation method can comprise the use of erbium fiber laser. In some aspects, an erbium fiber laser can emit light at a wavelength of about 1550 nm. In some aspects, the light from an erbium fiber laser can be frequency doubled to about 775 nm with pulse widths less than 100 femtoseconds.

[0197] In some aspects of the methods of the present disclosure, a two-photon excitation method can comprise the use of a 780 nm fiber-based femtosecond laser. In some aspects, the repetition rate of the laser can be specified from 10 to 80 MHz with clean pulse widths of less than 90 femtoseconds. In some aspects, the beam quality, M² factor, can be less than 1.2. In some aspects, the beam diameter can be about 1.57 mm. In some aspects, the beam circularity can be at least 94%.

[0198] The application of two photon illumination in the present invention resulted in three surprising improvements in the ability to detect and quantify protein and/or nucleic acid expression in a user-defined region of a tissue, user-defined cell, and/or user-defined subcellular structure within a cell. First, two photon illumination as used in the present invention provides dramatic improvements in Z and modest improvements in X-Y resolution. Second, with two photon illumination of the background in the whole field of view away from the features is also lower Third and perhaps most significant, with one-photon UV illumination, there are unexpected diffraction, scattering and/or light piping phenomena caused by cellular structures. These artifacts can significantly degrade the ability to focus UV light below diffraction expectations. These tissue artifacts are not present with two photon illumination as used in the present invention.

[0199] In some aspects, illuminating a location of a tissue sample can comprise illuminating the location using a light source selected from the group consisting of an arc-lamp, a laser, a focused UV light source, and light emitting diode. In some aspects, illuminating a location of a tissue sample can comprise illuminating the location using a light emitting diode (LED).

[0200] In some aspects, a location of a tissue sample can be illuminated with UV light of a power of at least about 1 W/cm², or at least about 10 W/cm², or at least about 20 W/cm², or at least about 30 W/cm², or at least about 40 W/cm², or at least about 50 W/cm², or at least about 60 W/cm², or at least about 70 W/cm², or at least about 80 W/cm², or at least about 90 W/cm², or at least about 100 W/cm². In some aspects, a location of a tissue sample can be illuminated with UV light of a power of about 1 W/cm², or about 10 W/cm², or about 20 W/cm², or about 30 W/cm², or about 40 W/cm², or about 50 W/cm², or about 60 W/cm², or about 70 W/cm², or about 80 W/cm², or about 90 W/cm², or about 100 W/cm².

[0201] In some aspects, a location of a tissue sample can be illuminated with a UV light of a power of about 40.9 W/cm². In some aspects, a location of a tissue sample can be illuminated with a power of about 20.45 W/cm².

[0202] In some aspects, a location of a tissue sample can be illuminated with UV light for a total of about at least 1 second, or at least about 2 seconds, or at least about 3 seconds, or at least about 4 seconds, or at least about 5 seconds, or at least about 6 seconds, or at least about 7 seconds, or at least about 8 seconds, or at least about 9 seconds or at least about 10 seconds. In some aspects, a location of a tissue sample can be illuminated with UV light for a total of about 1 second, or about 2 seconds, or about 3 seconds, or about 4 seconds, or about 5 seconds, or about 6 seconds, or about 7 seconds, or about 8 seconds, or about 9 seconds or about 10 seconds.

[0203] In some aspects, a location of a tissue sample can be illuminated with UV light for a total of about 5 seconds.

[0204] In some aspects, a location of a tissue sample can be illuminated with UV light such that the illumination is provided for a duration of about 0.1 seconds with intervals between of about 0.4 seconds.

[0205] In some aspects of the methods of the present disclosure, illuminating a location of a tissue sample can comprise illuminating the location using a UV light in combination with nonlinear TdT extension. Without wishing to be bound by theory, nonlinear TdT extension can occur due to competing release and depletion of salts. Without wishing to be bound by theory, nonlinear TdT extension can occur due to competing release and depletion of nucleotides. Without wishing to be bound by theory, nonlinear TdT extension occurs due to competing process of release and depletion of TdT enzyme. By using nonlinear TdT extension, the methods of the present disclosure can be used to synthesize spatial barcodes in smaller, more defined regions of the tissue sample, increasing the spatial resolution beyond the theorical optical resolution of the present disclosure.

### Locations or Regions of Interest

[0206] As used herein, the terms “location of a tissue sample” and a “region of interest” are used interchangeably to refer to a specific and defined area of the tissue sample within which the abundance of one or more target analytes will be quantified.

[0207] In some aspects of the methods of the present disclosure, a region of interest can be no less than about 10 nm in the x and/or y direction, or no less than about 100 nm in the x and/or y direction, or no less than about 200 nm in the x and/or y direction, or no less than about 300 nm in the x and/or y direction, or no less than about 400 nm in the x and/or y direction, or no less than about 500 nm in the x and/or y direction, or no less than about 600 nm in the x and/or y direction, or no less than about 700 nm in the x and/or y direction, or no less than about 800 nm in the x and/or y direction, or no less than about 900 nm in the x and/or y direction, or no less than 1 μm in the x and/or y direction, or no less than 10 μm in the x and/or y direction, or no less than about 100 μm in the x and/or y direction, or no less than about 200 μm in the x and/or y direction, or no less than about 300 μm in the x and/or y direction, or no less than about 400 μm in the x and/or y direction, or no less than about 500 μm in the x and/or y direction, or no less than about 600 μm in the x and/or y direction, or no less than about 700 μm in the x and/or y direction, or no less than about 800 μm in the x and/or y direction, or no less than about 900 μm in the x and/or y direction. In some aspects of the methods of the present disclosure, an illuminated location of a tissue sample can be no less than about 10 nm in the x and/or y direction, or no less than about 100 nm in the x and/or y direction, or no less than about 200 nm in the x and/or y direction, or no less than about 300 nm in the x and/or y direction, or no less than about 400 nm in the x and/or y direction, or no less than about 500 nm in the x and/or y direction, or no less than about 600 nm in the x and/or y direction, or no less than about 700 nm in the x and/or y direction, or no less than about 800 nm in the x and/or y direction, or no less than about 900 nm in the x and/or y direction, or no less than 1 μm in the x and/or y direction, or no less than 10 μm in the x and/or y direction, or no less than about 100 μm in the x and/or y direction, or no less than about 200 μm in the x and/or y direction, or no less than about 300 μm in the x and/or y direction, or no less than about 400 μm in the x and/or y direction, or no less than about 500 μm in the x and/or y direction, or no less than about 600 μm in the x and/or y direction, or no less than about 700 μm in the x and/or y direction, or no less than about 800 μm in the x and/or y direction, or no less than about 900 μm in the x and/or y direction.

[0208] In some aspects of the methods of the present disclosure, a region of interest can be no less than about 10 nm in the z direction, no less than about 500 nm in the z direction, or no less than about 1500 nm in the z direction. In some aspects of the methods of the present disclosure, an illuminated location of a tissue sample can be no more than about 1500 nm in the z direction.

[0209] A region of interest may be a tissue type present in a sample, a cell type, a cell, or a subcellular structure within a cell.

[0210] Together, a comparison of the identity and abundance of the target proteins and/or target nucleic acids present in a first region of interest (e.g., tissue type, a cell type (including normal and abnormal cells), and a subcellular structure within a cell) and the identity and abundance of the target proteins and/or target nucleic acids present in second region of interest or more regions of interest can be made using the methods of the present disclosure.

[0211] In some aspects, a region of interest may comprise a single cell. In some aspects, a region of interest may include a plurality of cells, such as, but not limited to, no more than two cells, no more than three cells, no more than four cells, no more than five cells, no more than six cells, no more than seven cells, no more than eight cells, no more than nine cells or no more than ten cells.

[0212] In some aspects, a region of interest may comprise a subcellular structure within a single cell.

[0213] In some aspects, an area of the tissue sample may be manually selected by a user and each cell within the area would be automatically identified as a region of interest and encoded. Cells can be identified by specific staining, and software used to locate the boundaries of the cell. Thus, the methods and systems described herein can encode each cell differently with minimal user interaction.

### Probe Collection

[0214] In some aspects of the methods of the present disclosure, the step of collecting the probes bound to target analytes in the tissue sample can comprise scraping the tissue sample, digesting the tissue sample with proteinase K or a combination thereof. In some aspects, a proteinase K digestion can be performed at about 56° ° C. for at least about one hour, followed by a further digestion at about 90° ° C. for at least about 15 minutes.

[0215] In some aspects of the methods of the present disclosure, the step of collecting the probes bound to target analytes in the tissue sample can comprise an Ampure SPRI purification, as would be appreciated by the skilled artisan.

[0216] In some aspects of the methods of the present disclosure, the step of collecting the probes bound to target analytes in the tissue sample can comprise an xGen hybridization capture-based purification, as would be appreciated by the skilled artisan.

[0217] In some aspects, an xGen hybridization capture-based purification comprises hybridizing at least one capture probe to the probes bound to target analytes in the tissue sample.

[0218] In some aspects, a capture probe can comprise and affinity moiety. An affinity moiety can be biotin.

[0219] In some aspects, a capture probe can comprise at least one copy of a nucleic acid sequence that is complementary to a probe of the present disclosure. In some aspects, a capture probe can comprise at least about two copies of a nucleic acid sequence that is complementary to a probe of the present disclosure. In some aspects, a capture probe can comprise at least about three, or at least about four, or at least about five, or at least about six, or at least about seven, or at least about eight, or at least about nine, or at least about ten copies of a nucleic acid sequence that is complementary to a probe of the present disclosure. The nucleic acid sequence that is complementary to a probe of the present disclosure can be complementary to an amplification primer binding site located on the probe.

[0220] FIG. 11 is an exemplary schematic of a method of purifying the probes collected from the tissue sample as part of quantifying the probes via sequencing. In this non-limiting example, the probe has a target binding domain, followed by an amplification primer binding site, followed by a unique molecular identifier, followed by a target identification domain. In this non-limiting example, a spatial barcode has been synthesized and extended on the 3′ end of the probe. The spatial barcode domain has been synthesized by TdT extension and comprises a spatial identifier sequence comprising four (#1, #2, #3 and #4) spatial identification domains, a delimiting domain and a polyT domain. In this non-limiting example, a capture probe is used, wherein the capture probe comprises two copies of a sequence that is complementary to the amplification primer binding site on the probe. The capture probe further comprises a biotin moiety. The capture probe is hybridized to the probe, and then the biotin moiety is bound to streptavidin-beads in 5×SSPE buffer. The beads can then be washed in hot 5×SSPE and room temperature (RT) 0.1×SSPE. The probes can then be eluted from the streptavidin beads in hot H₂O.

### Tissue Sample Pre-Treatment

[0221] In some aspects of the methods of the present disclosure, the step of contacting a tissue sample with at least one probe or a plurality of probes can comprise incubating the tissue sample with the at least one probe or the plurality of probes for at least about one hour, or at least about two hours, or at least about three hours, or at least about four hours, or at least about five hours, or at least about six hours, or at least about seven hours, or at least about eight hours, or at least about nine hours, or at least about 10 hours, or at least about 11 hours, or at least about 12 hours, or at least about 24 hours, or at least about 36 hours, or at least about 48 hours.

[0222] In some aspects of the methods of the present disclosure, the step of contacting a tissue sample with at least one probe or a plurality of probes can comprise contacting the tissue sample with the at least one probe or a plurality of probes in combination with blocking DNA that has been terminated with ddTTP.

[0223] In some aspects of the methods of the present disclosure, prior to contacting a tissue sample with at least one probe or a plurality of probes, the tissue sample can be subjected to ddTTP (dideoxthymidine-triphosphate) termination. ddTTP termination can comprise contacting the tissue sample with ddTTP and TdT. Without wishing to be bound by theory, ddTTP termination is performed to remove block free 3′-OH moieties of endogenous nucleic acids within the tissue sample, preventing the endogenous nucleic acids from being extended during the extension of the spatial barcodes.

[0224] In some aspects of the methods of the present disclosure, the step of collecting the probes bound to target analytes in the tissue sample can comprise ExoIII digestion. Without wishing to be bound by theory, ExoIII digestion allows for the removal of dsDNA and the enrichment of ssDNA or dsDNA with a protruding 3′ overhang.

### Landmarking Probes and Methods

[0225] In some aspects, the methods of the present disclosure can further comprise incubating a sample with at least one general landmarking probe of the present disclosure.

[0226] In some aspects, the methods of the present disclosure can further comprise detecting at least one general landmarking probe bound within a sample.

[0227] In some aspects, the detection of at least one general landmarking probe bound within the sample can be used to define the boundaries of individual cells within a sample. By detecting the boundaries of individual cells within a sample, spatial patterns can be determined for downstream synthesis of spatial barcodes within the sample. In some aspects, the detection of one or more general landmarking probes in a sample can be used to generate a fluorescent cell image that subsequently collected gene expression data can then be mapped onto to create a spatially-resolved profile of gene expression.

[0228] In some aspects, a general landmarking probe can comprise a detectable label.

[0229] In some aspects, the detectable label can be a fluorescent label. Examples of fluorescent labels include, but are not limited to, fluorescent proteins, fluorescent nanoparticles, fluorophores, and any other fluorescent moiety known in the art.

[0230] In some aspects, the detectable label can be a calorimetric label. In some aspects, the detectable label can be a chemiluminescent label. In some aspects, the detectable label can be a radioactive label.

[0231] In some aspects, a general landmarking probe can comprise at least one antibody. The antibody can specifically bind to at least one cellular marker. In some aspects, the at least one antibody can be linked, directly or indirectly, to at least one detectable label.

[0232] A cellular marker can be a cytoplasmic marker. A cellular marker can be any cytoplasmic marker known in the art. Examples of cytoplasmic markers include, but are not limited to, specific proteins that are located exclusively or primarily within the cytoplasm of a cell. Specific proteins that are located exclusively or primarily within the cytoplasm of a cell can include, but are not limited to, microtubule proteins, vimentin, desmin and cytokeratin.

[0233] A cellular marker can be a membrane marker. A cellular marker can be any membrane marker known in the art. Examples of membrane markers include, but are not limited to, specific proteins that are exclusively or primarily on, associated with, or embedded in a specific membrane within a cell. Examples of such proteins include, but are not limited to, sodium-potassium ATPase, plasma membrane calcium ATPase (PMCA), proteins of the cadherin family, CD98, proteins associated with caveolae (e.g. caveolin), any integral membrane protein known in the art and any membrane-associated protein known in the art.

[0234] A cellular marker can be an organelle marker. An organelle marker can be any organelle marker known in the art. Examples of organelle markers include, but are not limited to, specific proteins that are exclusively or primarily associated with a specific organelle (e.g. Endoplasmic reticulum, golgi apparatus, mitochondria, ribosome, lysosome, endosomes, peroxisome, autophagosome, or any other organelle known in the art). Examples of such proteins include, but are not limited to, calreticulin (endoplasmic reticulum), GM130 (golgi apparatus), ATP5A (mitochondria), TOMM20 (mitochondria), RPS3 (ribosome), M6PR (lysosome), EEA1 (endosome), RAB7 (endosome), catalase (peroxisome), SQSTM1/p62 (autophagosome) and LC3B (autophagosome).

[0235] A cellular marker can be a nuclear marker. A nuclear marker can be any nuclear marker known in the art. Examples of nuclear markers include, but are not limited to, specific proteins that are exclusively or primarily associated with the nucleus of a cell, or a specific sub-structure within the nucleus of the cell. Examples of such proteins include, but are not limited to KDM1, NUP98, Lamin A, Lamin C, Lamin, SC35, Fibrillarin, HP1 alpha, CENPA or any other nuclear protein known in the art. Nuclear markers can also include, but are not limited to, nucleic acid stains such as DAPI or SYTO9 to stain cellular nucleic acids.

[0236] In some aspects, a general landmarking probe of the present disclosure can comprise a dye that targets one or more specific membrane(s) in a cell such as the plasma membrane, the nuclear membrane, the endoplasmic reticulum membrane, the lysosome membrane or any other membrane known in the art.

[0237] In some aspects, a general landmarking probe of the present disclosure can be detected in order to define the boundaries of individual cells within a sample. By detecting the boundaries of individual cells within a sample, spatial patterns can be determined for downstream synthesis of spatial barcodes within the sample. In some aspects, the detection of one or more general landmarking probes in a sample can be used to generate a fluorescent cell image that subsequently collected gene expression can then be mapped onto to create a spatially-resolved profile of gene expression.

### Samples

[0238] In some aspects of the present disclosure, samples may comprise any number of things, including, but not limited to cells (including both primary cells and cultured cell lines) and tissues (including cultured or explanted). In aspects, a tissue sample (fixed or unfixed) is embedded, serially sectioned, and immobilized onto a microscope slide. As is well known, a pair of serial sections will include at least one cell that is present in both serial sections. Structures and cell types, located on a first serial section will have a similar location on an adjacent serial section. The sample can be cultured cells or dissociated cells (fixed or unfixed) that have been immobilized onto a slide. A sample can be a formalin-fixed paraffin-embedded (FFPE) tissue sample.

[0239] In aspects, a tissue sample is a biopsied tumor or a portion thereof, i.e., a clinically-relevant tissue sample. For example, the tumor may be from a breast cancer. The sample may be an excised lymph node.

[0240] The sample can be obtained from virtually any organism including multicellular organisms, e.g., of the plant, fungus, and animal kingdoms; preferably, the sample is obtained from an animal, e.g., a mammal. Human samples are particularly preferred.

[0241] In some aspects, the probes, compositions, methods, and kits described herein are used in the diagnosis of a condition. As used herein the term diagnose or diagnosis of a condition includes predicting or diagnosing the condition, determining predisposition to the condition, monitoring treatment of the condition, diagnosing a therapeutic response of the disease, and prognosis of the condition, condition progression, and response to particular treatment of the condition. For example, a tissue sample can be assayed according to any of the probes, methods, or kits described herein to determine the presence and/or quantity of markers of a disease or malignant cell type in the sample (relative to the non-diseased condition), thereby diagnosing or staging a disease or a cancer.

[0242] In general, samples attached to a slide can be first imaged using fluorescence (e.g., fluorescent antibodies or fluorescent stains (e.g., DAPI)) to identify morphology, regions of interest, cell types of interest, and single cells and then expression of proteins and/or nucleic acids can be digitally counted from the sample on the same slide.

### Sequencing

[0243] In some aspects of the methods of the present disclosure, quantifying via sequencing can comprise using any known sequencing method in the art to determine the number of probes that were collected that a) correspond to a specific target analyte (i.e. comprise a specific target identification domain) and that b) correspond bound to a specific location/region of interest (i.e. comprise the same identifier domains within a spatial barcode domain.

[0244] Sequencing can be performed by any known sequencing method, including, but not limited to next-generation sequencing methods, sequencing by synthesis, massively parallel sequencing, or any other sequencing method known and practice by the skilled artisan.

[0245] In a preferred aspect, nucleic acid amplification can be solid-phase nucleic acid amplification. Thus, in further aspects the invention provides a method of solid-phase nucleic acid amplification of template polynucleotide molecules which comprises: preparing a library of template polynucleotide molecules which have common sequences at their 5′ and 3′ ends using the methods of the present disclosure and carrying out a solid-phase nucleic acid amplification reaction wherein said template polynucleotide molecules are amplified. Compositions and methods for nucleic acid amplification and sequencing have been described in, e.g., U.S. Pat. No. 9,376,678, which is incorporated herein by reference in its entirety.

[0246] The term “solid-phase amplification” as used herein refers to any nucleic acid amplification reaction carried out on or in association with a solid support such that all or a portion of the amplified products are immobilized on the solid support as they are formed. In particular, the term encompasses solid-phase polymerase chain reaction (solid-phase PCR), which is a reaction analogous to standard solution phase PCR, except that one or both of the forward and reverse amplification primers is/are immobilized on the solid support.

[0247] Although the invention encompasses “solid-phase” amplification methods in which only one amplification primer is immobilized (the other primer usually being present in free solution), it is preferred for the solid support to be provided with both the forward and the reverse primers immobilized. In practice, there will be a “plurality” of identical forward primers and/or a “plurality” of identical reverse primers immobilized on the solid support, since the PCR process requires an excess of primers to sustain amplification. References herein to forward and reverse primers are to be interpreted accordingly as encompassing a “plurality” of such primers unless the context indicates otherwise.

[0248] As will be appreciated by the skilled reader, any given PCR reaction requires at least one type of forward primer and at least one type of reverse primer specific for the template to be amplified. However, in certain aspects the forward and reverse primers may comprise template-specific portions of identical sequence and may have entirely identical nucleotide sequence and structure (including any non-nucleotide modifications). In other words, it is possible to carry out solid-phase amplification using only one type of primer, and such single-primer methods are encompassed within the scope of the invention. Other aspects may use forward and reverse primers which contain identical template-specific sequences, but which differ in some other structural features. For example, one type of primer may contain a non-nucleotide modification which is not present in the other.

[0249] In other aspects of the invention the forward and reverse primers may contain template-specific portions of different sequence.

[0250] Amplification primers for solid-phase PCR are preferably immobilized by covalent attachment to the solid support at or near the 5′ end of the primer, leaving the template-specific portion of the primer free for annealing to its cognate template and the 3′ hydroxyl group free for primer extension. Any suitable covalent attachment means known in the art may be used for this purpose. The chosen attachment chemistry will depend on the nature of the solid support, and any derivatization or functionalization applied to it. The primer itself may include a moiety, which may be a non-nucleotide chemical modification, to facilitate attachment. In one particularly preferred aspect the primer may include a sulphur-containing nucleophile, such as phosphorothioate or thiophosphate, at the S′ end. In the case of solid-supported polyacrylamide hydrogels (as described below), this nucleophile will bind to a “C” group present in the hydrogel. The most preferred means of attaching primers and templates to a solid support is via 5′ phosphorothioate attachment to a hydrogel comprised of polymerized acrylamide and N-(5-bromoacetamidylpentyl)acrylamide (BRAPA).

[0251] The terms “cluster” and “colony” are used interchangeably herein to refer to a discrete site on a solid support comprised of a plurality of identical immobilized nucleic acid strands and a plurality of identical immobilized complementary nucleic acid strands. The term “clustered array” refers to an array formed from such clusters or colonies. In this context the term “array” is not to be understood as requiring an ordered arrangement of clusters.

[0252] The invention also encompasses methods of sequencing the amplified nucleic acids generated by solid-phase amplification. Thus, the invention provides a method of nucleic acid sequencing comprising amplifying a library of nucleic acid templates by the methods of the present disclosure described above, using solid-phase amplification as described above to amplify this library on a solid support, and carrying out a nucleic acid sequencing reaction to determine the sequence of the whole or a part of at least one amplified nucleic acid strand produced in the solid-phase amplification reaction.

[0253] Sequencing, as referred to herein, can be carried out using any suitable “sequencing-by-synthesis” technique, wherein nucleotides are added successively to a free 3′ hydroxyl group, resulting in synthesis of a polynucleotide chain in the S′ to 3′ direction. The nature of the nucleotide added is preferably determined after each nucleotide addition.

[0254] The initiation point for the sequencing reaction may be provided by annealing of a sequencing primer to a product of the whole genome or solid-phase amplification reaction. In this connection, one or both of the adapters added during formation of the template library may include a nucleotide sequence which permits annealing of a sequencing primer to amplified products derived by whole genome or solid-phase amplification of the template library.

[0255] The products of solid-phase amplification reactions wherein both forward and reverse amplification primers are covalently immobilized on the solid surface are so-called “bridged” structures formed by annealing of pairs of immobilized polynucleotide strands and immobilized complementary strands, both strands being attached to the solid support at the S′ end. Arrays comprised of such bridged structures provide inefficient templates for nucleic acid sequencing, since hybridization of a conventional sequencing primer to one of the immobilized strands is not favored compared to annealing of this strand to its immobilized complementary strand under standard conditions for hybridization.

[0256] In order to provide more suitable templates for nucleic acid sequencing it is preferred to remove substantially all or at least a portion of one of the immobilized strands in the “bridged” structure in order to generate a template which is at least partially single-stranded. The portion of the template which is single-stranded will thus be available for hybridization to a sequencing primer. The process of removing all or a portion of one immobilized strand in a “bridged” double-stranded nucleic acid structure may be referred to herein as “linearization”.

[0257] Bridged template structures may be linearized by cleavage of one or both strands with a restriction endonuclease or by cleavage of one strand with a nicking endonuclease. Other methods of cleavage can be used as an alternative to restriction enzymes or nicking enzymes, including inter alia chemical cleavage (e.g. cleavage of a diol linkage with periodate), cleavage of abasic sites by cleavage with endonuclease, or by exposure to heat or alkali, cleavage of ribonucleotides incorporated into amplification products otherwise comprised of deoxyribonucleotides, photochemical cleavage or cleavage of a peptide linker.

[0258] It will be appreciated that a linearization step may not be essential if the solid-phase amplification reaction is performed with only one primer covalently immobilized and the other in free solution.

[0259] In order to generate a linearized template suitable for sequencing it is necessary to remove “unequal” amounts of the complementary strands in the bridged structure formed by amplification so as to leave behind a linearized template for sequencing which is fully or partially single stranded. Most preferably one strand of the bridged structure is substantially or completely removed.

[0260] Following the cleavage step, regardless of the method used for cleavage, the product of the cleavage reaction may be subjected to denaturing conditions in order to remove the portion(s) of the cleaved strand(s) that are not attached to the solid support. Suitable denaturing conditions will be apparent to the skilled reader with reference to standard molecular biology protocols.

[0261] Denaturation (and subsequent re-annealing of the cleaved strands) results in the production of a sequencing template which is partially or substantially single-stranded. A sequencing reaction may then be initiated by hybridization of a sequencing primer to the single-stranded portion of the template.

[0262] Thus, the nucleic acid sequencing reaction may comprise hybridizing a sequencing primer to a single-stranded region of a linearized amplification product, sequentially incorporating one or more nucleotides into a polynucleotide strand complementary to the region of amplified template strand to be sequenced, identifying the base present in one or more of the incorporated nucleotide(s) and thereby determining the sequence of a region of the template strand.

[0263] One preferred sequencing method which can be used in accordance with the invention relies on the use of modified nucleotides that can act as chain terminators. Once the modified nucleotide has been incorporated into the growing polynucleotide chain complementary to the region of the template being sequenced there is no free 3′-OH group available to direct further sequence extension and therefore the polymerase cannot add further nucleotides. Once the nature of the base incorporated into the growing chain has been determined, the 3′ block may be removed to allow addition of the next successive nucleotide. By ordering the products derived using these modified nucleotides it is possible to deduce the DNA sequence of the DNA template. Such reactions can be done in a single experiment if each of the modified nucleotides has attached a different label, known to correspond to the particular base, to facilitate discrimination between the bases added at each incorporation step. Alternatively, a separate reaction may be carried out containing each of the modified nucleotides separately.

[0264] The modified nucleotides may carry a label to facilitate their detection. Preferably this is a fluorescent label. Each nucleotide type may carry a different fluorescent label. However, the detectable label need not be a fluorescent label. Any label can be used which allows the detection of an incorporated nucleotide.

[0265] One method for detecting fluorescently labelled nucleotides comprises using laser light of a wavelength specific for the labelled nucleotides, or the use of other suitable sources of illumination. The fluorescence from the label on the nucleotide may be detected by a CCD camera or other suitable detection means.

[0266] The invention is not intended to be limited to use of the sequencing method outlined above, as essentially any sequencing methodology which relies on successive incorporation of nucleotides into a polynucleotide chain can be used. Suitable alternative techniques include, for example, Pyrosequencing, FISSEQ (fluorescent in situ sequencing), MPSS (massively parallel signature sequencing) and sequencing by ligation-based methods.

### Hybridization

[0267] As used herein, the term “hybridize” is used in its broadest sense to mean the formation of a stable nucleic acid duplex. In one aspect, “stable duplex” means that a duplex structure is not destroyed by a stringent wash under conditions such as, for example, a temperature of either about 5° ° C. below or about 5° C. above the Tm of a strand of the duplex and low monovalent salt concentration, e.g., less than 0.2 M, or less than 0.1 M or salt concentrations known to those of skill in the art A duplex can be “perfectly matched”, such that the polynucleotide and/or oligonucleotide strands making up the duplex form a double stranded structure with one another such that every nucleotide in each strand undergoes Watson-Crick base pairing with a nucleotide in the other strand. The term “duplex” comprises, but is not limited to, the pairing of nucleoside analogs, such as deoxyinosine, nucleosides with 2-aminopurine bases, PNAs, and the like, that can be employed. A duplex can comprise at least one mismatch, wherein the term “mismatch” means that a pair of nucleotides in the duplex fail to undergo Watson-Crick bonding.

[0268] As used herein, the term “hybridization conditions,” will typically include salt concentrations of less than about 1 M, more usually less than about 500 mM and even more usually less than about 200 mM. Hybridization temperatures can be as low as 5° C., but are typically greater than 22° ° C., more typically greater than about 30° C., and often in excess of about 37° C. Hybridizations are usually performed under stringent conditions, e.g., conditions under which a probe will specifically hybridize to its target analyte. Stringent conditions are sequence-dependent and are different in different circumstances. Longer fragments can require higher hybridization temperatures for specific hybridization. As other factors can affect the stringency of hybridization, including base composition and length of the complementary strands, presence of organic solvents and extent of base mismatching, the combination of parameters is more important than the absolute measure of any one alone. Certain hybridization conditions will promote the formation of a duplex between the entire length of a target binding domain and the target analyte. Other hybridization conditions will promote the formation of a duplex only along certain portions of the target binding domain.

### Compositions of the Present Disclosure

[0269] The present disclosure provides a composition comprising any of the probes, extended probes or probe-intermediates described herein.

[0270] The present disclosure provides a composition comprising a plurality of the probes, extended probes or probe-intermediates described herein.

### EXEMPLARY EMBODIMENTS

[0271] Embodiment 1. A method for in situ synthesis of a nucleic acid sequence in a tissue sample, the method comprising:
[0272] a) contacting the tissue sample with at least one probe,
   [0273] wherein the probe comprises a target-binding domain and a target identification domain,
   [0274] wherein the probe comprises a free 3′-OH moiety, and
   [0275] wherein the target-binding domain binds to at least one target molecule located at a first location of the tissue sample;
[0276] b) contacting the tissue sample with at least one reversible terminator nucleotide, at least one polymerase, at least one caged chelator-cofactor complex, and at least one unbound caged chelator,
   [0277] wherein the at least one caged chelator-cofactor complex comprises at least one cofactor bound to a caged chelator;
   [0278] wherein the at least one reversible terminator nucleotide comprises the nucleotide operably linked to a cleavable 3′ terminator moiety;
[0279] c) illuminating the first location of the tissue sample with light sufficient to uncage the at least one caged chelator-cofactor complex, thereby releasing the at least one cofactor,
   [0280] thereby activating the at least one polymerase,
   [0281] thereby ligating the at least one reversible terminator nucleotide to the free 3′-OH moiety of the at least one bound probe;
[0282] d) washing the tissue sample;
[0283] e) treating the tissue sample under conditions sufficient to cleave the 3′ terminator moiety of the at least one reversible terminator nucleotide ligated in step (c), thereby exposing a free 3′-OH moiety on the extended at least one bound probe; and
[0284] f) repeating steps (b)-(e) until the nucleic acid sequence has been synthesized.

[0285] Embodiment 2. The method of embodiment 1, wherein the target-binding domain binds to at least one target molecule at an at least second location of the tissue sample, and wherein the method further comprises repeating steps (b)-(f) at the at least second location.

[0286] Embodiment 3. The method of any one of the preceding embodiments, wherein the nucleic acid sequence synthesized at the first location of the tissue sample is different than the nucleic acid sequence synthesized at the at least second location of the tissue sample.

[0287] Embodiment 4. A method of producing a spatially-resolved profile of the abundance of at least two target analytes in a first and an at least second location of a tissue sample comprising:
[0288] a) contacting the tissue sample with a solution comprising at least two species of probes, the probes comprising a target-binding domain and a target identification domain,
   [0289] wherein each species of probe comprises a unique target-binding domain that binds to one of the at least two target analytes and a unique target identification domain specific for the target analyte, and a free 3′-OH moiety;
[0290] b) contacting the tissue sample with a first plurality of reversible terminator nucleotides, a first plurality of polymerases, a first plurality of caged chelator-cofactor complexes, and a first plurality of unbound caged chelator,
   [0291] wherein at least one caged chelator-cofactor complex in the first plurality comprises at least one cofactor bound to a caged chelator;
   [0292] wherein at least one reversible terminator nucleotide in the first plurality comprises the nucleotide operably linked to a cleavable 3′ terminator moiety;
[0293] c) illuminating at least one location of the tissue sample with light sufficient to uncage the caged chelator-cofactor complexes, thereby releasing the cofactors at the at least one location of the tissue sample, thereby activating the polymerases at the at least one location of the tissue sample
[0294] thereby ligating a reversible terminator nucleotide to the free 3′-OH moiety of at least one probe bound to a target analyte at the at least one location of the tissue sample, thereby extending the at least one bound probe;
[0295] d) washing the tissue sample;
[0296] e) treating the tissue sample under conditions sufficient to cleave the 3′ terminator moiety of the at least one reversible terminator nucleotide ligated in step (c), thereby exposing a free 3′-OH moiety on the extended at least one bound probe;
[0297] f) repeating steps (b)-(e) until
   [0298] at least one probe bound to a target analyte in the first location of the tissue sample has been extended such that a first spatial barcode domain has been synthesized, wherein the first spatial barcode domain comprises a unique nucleic acid sequence specific to the first location of the tissue sample,
   [0299] at least one probe bound to a target analyte in the at least second location of the tissue sample has been extended such that a second spatial barcode domain has been synthesized, wherein the second spatial barcode domain comprises a unique nucleic acid sequence specific to the at least second location of the tissue sample;
[0300] g) collecting the probes bound to target analytes in the tissue sample; and
[0301] h) quantifying via sequencing the probes collected in step (f), thereby determining the abundance of the at least two target analytes in the first and the at least second location of the tissue sample, thereby producing a spatially-resolved profile of the abundance of the at least two target analytes.

[0302] Embodiment 5. The method of embodiment 5 or embodiment 6, further comprising comparing the abundance of the at least two target analytes in the first location of the tissue sample and the at least two target analytes in the at least second location of the tissue sample.

[0303] Embodiment 6. The method of any one of the preceding embodiments, wherein the polymerase is terminal deoxynucleotidyl transferase or a biologically active fragment thereof.

[0304] Embodiment 7. The method of any one of the preceding embodiments, wherein the cleavable 3′ terminator moiety is a 3′-ONH₂ group.

[0305] Embodiment 8. The method of any one of the preceding embodiments, wherein the caged-chelator is a caged divalent cation chelator.

[0306] Embodiment 9. The method of any one of the preceding embodiments, wherein the caged-chelator is 1-(4,5-Dimethoxy-2-Nitrophenyl)-1,2-Diaminoethane-N,N,N′,N′-Tetraacetic Acid (DMNP-EDTA).

[0307] Embodiment 10. The method of any one of the preceding embodiments, wherein the cofactor is a divalent metal cofactor.

[0308] Embodiment 11. The method of any one of the preceding embodiments, wherein the cofactor is Co²⁺, Mg²⁺, Mn²⁺ Ca²⁺, Cd²⁺, Zn²⁺ or Fe²⁺.

[0309] Embodiment 12. The method of any one of the preceding embodiments, wherein the cofactor is Co²⁺.

[0310] Embodiment 13. The method of any one of the preceding embodiments, wherein contacting a tissue sample with a cofactor comprises contacting the tissue sample with a salt form of the cofactor.

[0311] Embodiment 14. The method of any one of the preceding embodiments, wherein the light sufficient to uncage the caged chelator-cofactor complex is UV light.

[0312] Embodiment 15. The method of any one of the preceding embodiments, wherein treating the tissue sample under conditions sufficient to cleave the 3′ terminator moiety of the at least one reversible terminator nucleotide comprises treating the tissue sample under acidic conditions.

[0313] Embodiment 16. The method of any one of the preceding embodiments, wherein treating the tissue sample under acidic conditions comprises contacting the tissue sample with a solution with a pH of about 5.5.

[0314] Embodiment 17. The method of any one of the preceding embodiments, wherein the probes further comprise a unique molecular identifier.

[0315] Embodiment 18. The method of any one of the preceding embodiments, wherein the probes further comprise an amplification primer binding site.

[0316] Embodiment 19. The method of any one of the preceding embodiments, wherein the amplification primer binding site is at least about 24 nucleotides in length.

[0317] Embodiment 20. The method of any one of the preceding embodiments, wherein the probes further comprise a constant region.

[0318] Embodiment 21. The method of any one of the preceding embodiments, wherein the constant region is at least about 12 to at least about 20 nucleotides in length.

[0319] Embodiment 22. The method of any one of the preceding embodiments, wherein the probes comprise, from 5′ to 3′, the target binding domain, followed by the amplification primer binding site, followed by the unique molecular identifier, followed by the target identification domain, followed by the constant region.

[0320] Embodiment 23. The method of any one of the preceding embodiments, wherein the spatial barcode domain of at least one probe bound to a target analyte in the first location of the tissue sample comprises a unique spatial identifier sequence specific to the first location of the tissue sample.

[0321] Embodiment 24. The method of any one of the preceding embodiments, wherein the spatial barcode domain of at least one probe bound to a target analyte in the at least second location of the tissue sample comprises a unique spatial identifier sequence specific to the at least second location of the tissue sample.

[0322] Embodiment 25. The method of any one of the preceding embodiments, wherein the spatial identifier sequence comprises at least about 20 nucleotides.

[0323] Embodiment 26. The method of any one of the preceding embodiments, wherein the spatial identifier sequence comprises at least about 28 nucleotides.

[0324] Embodiment 27. The method of any one of the preceding embodiments, wherein the spatial identifier sequence comprises at least four spatial identification domains.

[0325] Embodiment 28. The method of any one of the preceding embodiments, wherein each of the at least four spatial identification domains comprise the same number of nucleotides.

[0326] Embodiment 29. The method of any one of the preceding embodiments, wherein at least one of the at least four spatial identifications domains comprise a different number of nucleotides as compared to another spatial identification domain within the same spatial barcode.

[0327] Embodiment 30. The method of any one of the preceding embodiments, wherein each spatial identification domain comprises about 1 to about 4 nucleotides.

[0328] Embodiment 31. The method of any one of the preceding embodiments, wherein each spatial identification domain comprises about 4 nucleotides.

[0329] Embodiment 32. The method of any one of the preceding embodiments, wherein each of the at least four spatial identification domains comprise the same nucleotide at the 3′ terminus

[0330] Embodiment 33. The method of any one of the preceding embodiments, wherein the method further comprises, after step (f) and prior to step (g), repeating steps (b)-(e) to extend the spatial barcode domain in each location of the tissue sample such that the spatial barcode domain comprises, at the 3′ end, a delimiting domain.

[0331] Embodiment 34. The method of any one of the preceding embodiments, wherein the method further comprises, after step (f) and prior to step (g), extending the spatial barcode domain in each location of the tissue sample such that the spatial barcode domain comprises a polyT domain.

[0332] Embodiment 35. The method of any one of the preceding embodiments, wherein the method further comprises, after step (f) and prior to step (g):
[0333] (i) repeating steps (b)-(e) to extend the spatial barcode domain in each location of the tissue sample such that the spatial barcode domain comprises, a delimiting domain; and
[0334] (ii) extending the spatial barcode domain in each location of the tissue sample such that the spatial barcode domain comprises a polyT domain.

[0335] Embodiment 36. The method of any one of the preceding embodiments, wherein the delimiting domain is at least about 4 to at least about 6 nucleotides in length.

[0336] Embodiment 37. The method of any one of the preceding embodiments, wherein the sequence of the delimiting domain is the same for every spatial barcode in the sample.

[0337] Embodiment 38. The method of any one of the preceding embodiments, wherein the polyT domain comprises at least about 14 nucleotides.

[0338] Embodiment 39. The method of any one of the preceding embodiments, wherein the illumination in step (c) is provided by a light source selected from the group consisting of an arc-lamp, a laser, a focused UV light source, and light emitting diode.

[0339] Embodiment 40. The method of any one of the preceding embodiments, wherein the first location of the tissue sample and the at least second location of the tissue sample are subcellular.

[0340] Embodiment 41. The method of any one of the preceding embodiments, wherein the first location of the tissue sample and the at least second location of the tissue sample each comprise no more than one cell.

[0341] Embodiment 42. The method of any one of the preceding embodiments, wherein the first location of the tissue sample and the at least second location of the tissue sample each comprise no more than ten cells.

[0342] Embodiment 43. The method of any one of the preceding embodiments, wherein each cell within the first location of the tissue sample and the at least second location of the tissue sample are individually automatically identified and encoded.

[0343] Embodiment 44. The method of any one of the preceding embodiments, the method further comprising prior to step (a), subjecting the tissue sample to ddTTP (dideoxthymidine-triphosphate) termination.

[0344] Embodiment 45. The method of any one of the preceding embodiments, wherein subjecting the tissue sample to ddTTP termination comprises contacting the tissue sample with ddTTP and TdT.

[0345] Embodiment 46. The method of any one of the preceding embodiments, the method further comprising after step (g) and prior to step (h), amplifying the collected probes.

[0346] Embodiment 47. The method of any one of the preceding embodiments, wherein amplifying the collected probes comprises the use of a first amplification primer and a second amplification primer, wherein the first amplification primer comprises a first flow cell adapter sequence, a first NGS index sequence and a first sequencing primer binding site, and the second amplification primer comprises a second flow cell adapter sequence, a second NGS index sequence and second sequencing primer binding site.

[0347] Embodiment 48. The method of any one of the preceding embodiments, wherein at least one of the first and the second amplification primers comprises a nucleic acid sequence that is complementary to the delimiting sequence and/or the poly T domain.

### EXAMPLES

### Example 1—In Situ TdT-Mediated Nucleic Acid Extension Performed in a Spatially-Controlled Manner Using the Methods of the Present Disclosure

[0348] A flow cell was constructed with a glass slide loaded with FFPE cell pellet array section using a 75 μm thick adhesive layer and cover glass. To perform in situ TdT-mediated nucleic acid extension, the FFPE cell pellet array was contacted with a writing reaction mix comprising 2 U/uL of wildtype TdT enzyme, 1 mM CoCl₂, 1.3 mM DMNP-EDTA, 1 mM dTTP, 0.05 mM FITC-dUTP in base buffer and exposed to patterned UV illumination with 385 nm LED light source under different driving power. The base buffer for writing reaction mix was either 200 mM potassium cacodylate, 25 mM Tris, 0.1% Tween20, pH 7.9 or 50 mM potassium acetate, 20 mM Tris-acetate, pH 7.9.

[0349] UV illumination specific ROIs was done in pulses with different durations, intervals and total UV times to test different illumination conditions. A 385 nm LED was used to provide the illumination.

[0350] After UV exposure, the flow cell was washed with a wash buffer comprising 8.75×SSPE, 0.1% Tween20. The flow cell was then imaged to analyze any FITC-dUTP incorporated during the writing reaction. Furthermore, the FFPE cell pellet array was contacted with a solution comprising 20 nm of 14mer poly-A DNA molecules conjugated with Alexa546 dye for 15 min to allow hybridization of the labeled poly-A molecules to any poly-T tails incorporated during the writing reaction. After this incubation, the flow cell was washed with wash buffer. The flow cell was then imaged to analyze the any labeled poly-A molecules hybridized to the incorporated poly(T) tail in cell pellet array sample. The detection of fluorescence signal from either the incorporated FITC-dUTP or the bound Alexa546-conjugated poly(A) detection probes indicates the successful TdT-mediated tailing reaction.

[0351] In a first experiment, in situ TdT-mediated nucleic acid extension according to the methods of the present disclosure was performed in the potassium cacodylate buffer described above at 37° C. UV illumination was provided at a power of about 4.3 W/cm² with 58.8 ms UV pulses on a 15 second interval for a total 4.294 seconds of UV exposure during a total time period of 30 minutes. Some locations on the cell pellet array received additional UV pulses of either 2 second, 10 second or 20 second duration with a 50% duty cycle for a total of 5 minute or 10 minute total additional UV exposure. No enhanced signal from locations with additional UV exposure was observed and the 26.4 seconds of UV exposure with approximately a 30-minute post-UV incubation was sufficient to perform an in situ TdT extension of 14 or more nucleotides. Following the in situ TdT extension, the cell pellet array was analyzed for FITC-dUTP incorporation, as described above. The results of this analysis are shown in FIG. 12. The results shown in FIG. 12 demonstrate that the spatial resolution of in situ TdT extension performed according to the methods of the present disclosure can be on the order of about 5.5 μm, which is less than the average diameter of one cell (about 12.5 μm). Nonlinear effects associated with Salt release by UV, TdT activation and subsequent depletion of salts create conditions that would allow the in situ synthesis of spatial barcode domains within a specific area of a tissue sample that is smaller than a single cell.

[0352] A similar experiment was performed using UV exposures of differing power, pulses, intervals and total durations, as well as different buffers (either the Tris-based or Cacodylate-based buffer described above) Again, the cell pellet array was analyzed for FITC-dUTP incorporation, as described above. The results of this analysis are shown in FIG. 13. FIG. 13 shows the normalized FITC-dUTP signal as a function of the x coordinate (top graph) for different experimental conditions (bottom table). As shown in FIG. 13, sharper writing boundaries were observed in conditions with lower UV irradiance and shorter pulses.

[0353] Another experiment was performed using the UV exposures of differing exposures of differing power, pulses, intervals and total durations, as put forth in FIG. 14A and FIG. 14B. The experiments were performed using the cacodylate-based buffer described above. Following the in situ TdT extension, the cell pellet array was analyzed for FITC-dUTP incorporation, as described above. The results of this analysis are shown in FIG. 15 and FIG. 16. The star symbols in FIG. 15 and FIG. 16 indicate experimental conditions where clear writing boundaries were observed. As shown in FIG. 15, when a UV power of 3.65 W/cm² was used, stronger in situ TdT mediated extension was observed when higher total UV exposure times (≥10 seconds) were used. Moreover, clear writing boundaries were observed when the total UV exposure time was ≥30 seconds. Finally, a 0.1 second interval resulted in decreased extension as compared to a 1 second or 4 second interval. Without wishing to be bound by theory, these results indicate that dNTP incorporation is the rate-limiting step. As shown in FIG. 16, when a UV power of 16.8 W/cm² or 40.9 W/cm² were used, clear writing boundaries were observed when the total UV time was ≥10 seconds, with a 0.4 second interval sufficient for longer nucleotide extensions. Moreover, the results shown in FIG. 16 indicate that higher UV power shortens the total UV exposure time that is required for in situ TdT mediated extension. Taken together, the results in FIG. 15 and FIG. 16 demonstrate that short pulses of high UV irradiance allow for the creation of clear writing boundaries in a short period of time, and that long UV-off intervals of ≥0.4 seconds results in stronger in situ TdT-mediated extension.

[0354] Taken together, the results described in this example demonstrate that the methods of the present disclosure can effectively be used to extend nucleic acids in situ in a spatially-controlled manner, with a spatial resolution that is less than the diameter of an average cell.

What is claimed is:

1. A method for in situ synthesis of a nucleic acid sequence in a tissue sample, the method comprising:
a) contacting the tissue sample with at least one probe,
wherein the probe comprises a target-binding domain and a target identification domain,
wherein the probe comprises a free 3′-OH moiety, and
wherein the target-binding domain binds to at least one target molecule located at a first location of the tissue sample;
b) contacting the tissue sample with at least one reversible terminator nucleotide, at least one polymerase, at least one caged chelator-cofactor complex, and at least one unbound caged chelator,
wherein the at least one caged chelator-cofactor complex comprises at least one cofactor bound to a caged chelator;
wherein the at least one reversible terminator nucleotide comprises the nucleotide operably linked to a cleavable 3′ terminator moiety;
c) illuminating the first location of the tissue sample with light sufficient to uncage the at least one caged chelator-cofactor complex, thereby releasing the at least one cofactor,
thereby activating the at least one polymerase,
thereby ligating the at least one reversible terminator nucleotide to the free 3′-OH moiety of the at least one bound probe;
d) washing the tissue sample;
e) treating the tissue sample under conditions sufficient to cleave the 3′ terminator moiety of the at least one reversible terminator nucleotide ligated in step (c), thereby exposing a free 3′-OH moiety on the extended at least one bound probe; and
f) repeating steps (b)-(e) until the nucleic acid sequence has been synthesized.

2. The method of claim 1, wherein the target-binding domain binds to at least one target molecule at an at least second location of the tissue sample, and wherein the method further comprises repeating steps (b)-(f) at the at least second location.

3. The method of any one of the preceding claims, wherein the nucleic acid sequence synthesized at the first location of the tissue sample is different than the nucleic acid sequence synthesized at the at least second location of the tissue sample.

4. A method of producing a spatially-resolved profile of the abundance of at least two target analytes in a first and an at least second location of a tissue sample comprising:
a) contacting the tissue sample with a solution comprising at least two species of probes, the probes comprising a target-binding domain and a target identification domain,
wherein each species of probe comprises a unique target-binding domain that binds to one of the at least two target analytes and a unique target identification domain specific for the target analyte, and a free 3′-OH moiety;
b) contacting the tissue sample with a first plurality of reversible terminator nucleotides, a first plurality of polymerases, a first plurality of caged chelator-cofactor complexes, and a first plurality of unbound caged chelator,
wherein at least one caged chelator-cofactor complex in the first plurality comprises at least one cofactor bound to a caged chelator;
wherein at least one reversible terminator nucleotide in the first plurality comprises the nucleotide operably linked to a cleavable 3′ terminator moiety;
c) illuminating at least one location of the tissue sample with light sufficient to uncage the caged chelator-cofactor complexes, thereby releasing the cofactors at the at least one location of the tissue sample,
thereby activating the polymerases at the at least one location of the tissue sample
thereby ligating a reversible terminator nucleotide to the free 3′-OH moiety of at least one probe bound to a target analyte at the at least one location of the tissue sample, thereby extending the at least one bound probe;
d) washing the tissue sample;
e) treating the tissue sample under conditions sufficient to cleave the 3′ terminator moiety of the at least one reversible terminator nucleotide ligated in step (c), thereby exposing a free 3′-OH moiety on the extended at least one bound probe;
f) repeating steps (b)-(e) until
at least one probe bound to a target analyte in the first location of the tissue sample has been extended such that a first spatial barcode domain has been synthesized, wherein the first spatial barcode domain comprises a unique nucleic acid sequence specific to the first location of the tissue sample,
at least one probe bound to a target analyte in the at least second location of the tissue sample has been extended such that a second spatial barcode domain has been synthesized, wherein the second spatial barcode domain comprises a unique nucleic acid sequence specific to the at least second location of the tissue sample;
g) collecting the probes bound to target analytes in the tissue sample; and
h) quantifying via sequencing the probes collected in step (f), thereby determining the abundance of the at least two target analytes in the first and the at least second location of the tissue sample, thereby producing a spatially-resolved profile of the abundance of the at least two target analytes.

5. The method of claim 5 or claim 6, further comprising comparing the abundance of the at least two target analytes in the first location of the tissue sample and the at least two target analytes in the at least second location of the tissue sample.

6. The method of any one of the preceding claims, wherein the polymerase is terminal deoxynucleotidyl transferase or a biologically active fragment thereof.

7. The method of any one of the preceding claims, wherein the cleavable 3′ terminator moiety is a 3′-ONH₂ group.

8. The method of any one of the preceding claims, wherein the caged-chelator is a caged divalent cation chelator, preferably wherein the caged-chelator is 1-(4,5-Dimethoxy-2-Nitrophenyl)-1,2-Diaminoethane-N,N,N′,N′-Tetraacetic Acid (DMNP-EDTA).

9. The method of any one of the preceding claims, wherein the cofactor is a divalent metal cofactor, preferably wherein the cofactor is Co²⁺, Mg²⁺, Mn²⁺ Ca²⁺, Cd²⁺, Zn²⁺ or Fe²⁺, preferably wherein the cofactor is Co²⁺.

10. The method of any one of the preceding claims, wherein the light sufficient to uncage the caged chelator-cofactor complex is UV light.

11. The method of any one of the preceding claims, wherein treating the tissue sample under conditions sufficient to cleave the 3′ terminator moiety of the at least one reversible terminator nucleotide comprises treating the tissue sample under acidic conditions, preferably wherein treating the tissue sample under acidic conditions comprises contacting the tissue sample with a solution with a pH of about 5.5.

12. The method of any one of the preceding claims, wherein the probes further comprise:
i) a unique molecular identifier;
ii) an amplification primer binding site;
iii) a constant region; or
iv) any combination of the preceding,
preferably wherein the probes comprise, from 5′ to 3′, the target binding domain, followed by the amplification primer binding site, followed by the unique molecular identifier, followed by the target identification domain, followed by the constant region.

13. The method of any one of the preceding claims, wherein the spatial barcode domain of at least one probe bound to a target analyte in the first location of the tissue sample comprises a unique spatial identifier sequence specific to the first location of the tissue sample, and/or
the spatial barcode domain of at least one probe bound to a target analyte in the at least second location of the tissue sample comprises a unique spatial identifier sequence specific to the at least second location of the tissue sample.

14. The method of any one of the preceding claims, wherein the spatial identifier sequence comprises
i) at least about 20 nucleotides; or
ii) at least about 28 nucleotides.

15. The method of any one of the preceding claims, wherein the spatial identifier sequence comprises at least four spatial identification domains, preferably wherein
i) each of the at least four spatial identification domains comprise the same number of nucleotides; or
ii) at least one of the at least four spatial identifications domains comprise a different number of nucleotides as compared to another spatial identification domain within the same spatial barcode.

16. The method of any one of the preceding claims, wherein each spatial identification domain comprises about 1 to about 4 nucleotides, preferably wherein each spatial identification domain comprises about 4 nucleotides.

17. The method of any one of the preceding claims, wherein each of the at least four spatial identification domains comprise the same nucleotide at the 3′ terminus

18. The method of any one of the preceding claims, wherein the method further comprises, after step (f) and prior to step (g), repeating steps (b)-(e) to extend the spatial barcode domain in each location of the tissue sample such that the spatial barcode domain comprises, at the 3′ end, a delimiting domain.

19. The method of any one of the preceding claims, wherein the method further comprises, after step (f) and prior to step (g), extending the spatial barcode domain in each location of the tissue sample such that the spatial barcode domain comprises a polyT domain.

20. The method of any one of the preceding claims, wherein the method further comprises, after step (f) and prior to step (g):
(i) repeating steps (b)-(e) to extend the spatial barcode domain in each location of the tissue sample such that the spatial barcode domain comprises, a delimiting domain; and
(ii) extending the spatial barcode domain in each location of the tissue sample such that the spatial barcode domain comprises a polyT domain.

21. The method of any one of the preceding claims, wherein the sequence of the delimiting domain is the same for every spatial barcode in the sample.

22. The method of any one of the preceding claims, wherein the first location of the tissue sample and the at least second location of the tissue sample are subcellular.

23. The method of any one of the preceding claims, wherein the first location of the tissue sample and the at least second location of the tissue sample each
i) comprise no more than one cell; or
ii) comprise no more than ten cells.

24. The method of any one of the preceding claims, the method further comprising prior to step (a), subjecting the tissue sample to ddTTP (dideoxthymidine-triphosphate) termination, preferably wherein subjecting the tissue sample to ddTTP termination comprises contacting the tissue sample with ddTTP and TdT.

25. The method of any one of the preceding claims, the method further comprising after step (g) and prior to step (h), amplifying the collected probes, preferably wherein amplifying the collected probes comprises the use of a first amplification primer and a second amplification primer, wherein
the first amplification primer comprises a first flow cell adapter sequence, a first NGS index sequence and a first sequencing primer binding site, and
the second amplification primer comprises a second flow cell adapter sequence, a second NGS index sequence and second sequencing primer binding site.

26. The method of any one of the preceding claims, wherein at least one of the first and the second amplification primers comprises a nucleic acid sequence that is complementary to the delimiting sequence and/or the polyT domain.

The application's sequence listing, which the Patent Office published only in electronic form, follows.

SEQUENCE LISTING (10406 sequences)

SEQ ID NO: 1 - protein, 510 aa, Artificial Sequence
  Synthetic Sequence
MDPLQAVHLGPRKKRPRQLGTPVASTPYDIRFRDLVLFILEKKMGTTRRAFLMELARRKGFRVENELSDSVTHIVAENNSGSDVLEWLQLQNIKASSELELLDISWLIECMGAGKPVEMMGRHQLVVNRNSSPSPVPGSQNVPAPAVKKISQYACQRRTTLNNYNQLFTDALDILAENDELRENEGSCLAFMRASSVLKSLPFPITSMKDTEGIPCLGDKVKSIIEGIIEDGESSEAKAVLNDERYKSFKLFTSVFGVGLKTAEKWFRMGFRTLSKIQSDKSLRFTQMQKAGFLYYEDLVSCVNRPEAEAVSMLVKEAVVTFLPDALVTMTGGFRRGKMTGHDVDFLITSPEATEDEEQQLLHKVTDFWKQQGLLLYCDILESTFEKFKQPSRKVDALDHFQKCFLILKLDHGRVHSEKSGQQEGKGWKAIRVDLVMCPYDRRAFALLGWTGSRQFERDLRRYATHERKMMLDNHALYDRTKRVFLEAESEEEIFAHLGLDYIEPWERNA

SEQ ID NO: 2 - protein, 379 aa, Artificial Sequence
  Synthetic Sequence
SPSPVPGSQNVPAPAVKKISQYACQRRTTLNNYNQLFTDALDILAENDELRENEGSCLAFMRASSVLKSLPFPITSMKDTEGIPCLGDKVKSIIEGIIEDGESSEAKAVLNDERYKSFKLFTSVFGVGLKTAEKWFRMGFRTLSKIQSDKSLRFTQMQKAGFLYYEDLVSCVNRPEAEAVSMLVKEAVVTFLPDALVTMTGGFRRGKMTGHDVDFLITSPEATEDEEQQLLHKVTDFWKQQGLLLYCDILESTFEKFKQPSRKVDALDHFQKCFLILKLDHGRVHSEKSGQQEGKGWKAIRVDLVMCPYDRRAFALLGWTGSRQFERDLRRYATHERKMMLDNHALYDRTKRVFLEAESEEEIFAHLGLDYIEPWERNA

SEQ ID NO: 3 - protein, 379 aa, Artificial Sequence
  Synthetic Sequence
SPSPVPGSQNVPAPAVKKISQYACQRRTTLNNYNQLFTDALDILAENDELRENEGSALAFMRASSVLKSLPFPITSMKDTEGIPSLGDKVKSIIEGIIEDGESSEAKAVLNDERYKSFKLFTSVFGVGLKTAEKWFRMGFRTLSKIQSDKSLRFTQMQKAGFLYYEDLVSAVNRPEAEAVSMLVKEAVVTFLPDALVTMTGGFRRGKMTGHDVDFLITSPEATEDEEQQLLHKVTDFWKQQGLLLYADILESTFEKFKQPSRKVDALDHFQKCFLILKLDHGRVHSEKSGQQEGKGWKAIRVDLVMSPYDRRAFALLGWTGSRQFERDLRRYATHERKMMLDNHALYDRTKRVFLEAESEEEIFAHLGLDYIEPWERNA

SEQ ID NO: 4 - protein, 379 aa, Artificial Sequence
  Synthetic Sequence
SPSPVPGSQNVPAPAVKKISQYACQRRTTLNNYNQLFTDALDILAENDCLRENEGSALAFMRASSVLKSLPFPITSMKDTEGIPSLGDKVKSIIEGIIEDGESSEAKAVLNDERYKSFKLFTSVFGVGLKTAEKWFRMGFRTLSKIQSDKSLRFTQMQKAGFLYYEDLVSAVNRPEAEAVSMLVKEAVVTFLPDALVTMTGGFRRGKMTGHDVDFLITSPEATEDEEQQLLHKVTDFWKQQGLLLYADILESTFEKFKQPSRKVDALDHFQKCFLILKLDHGRVHSEKSGQQEGKGWKAIRVDLVMSPYDRRAFALLGWTGSRQFERDLRRYATHERKMMLDNHALYDRTKRVFLEAESEEEIFAHLGLDYIEPWERNA

SEQ ID NO: 5 - protein, 379 aa, Artificial Sequence
  Synthetic Sequence
SPSPVPGSQNVPAPAVKKISQYACQRRTTLNNYNQLFTDALDILAENDELRENEGSCLAFMRASSVLKSLPFPITSMKDTEGIPSLGDKVKSIIEGIIEDGESSEAKAVLNDERYKSFKLFTSVFGVGLKTAEKWFRMGFRTLSKIQSDKSLRFTQMQKAGFLYYEDLVSAVNRPEAEAVSMLVKEAVVTFLPDALVTMTGGFRRGKMTGHDVDFLITSPEATEDEEQQLLHKVTDFWKQQGLLLYADILESTFEKFKQPSRKVDALDHFQKCFLILKLDHGRVHSEKSGQQEGKGWKAIRVDLVMSPYDRRAFALLGWTGSRQFERDLRRYATHERKMMLDNHALYDRTKRVFLEAESEEEIFAHLGLDYIEPWERNA

SEQ ID NO: 6 - protein, 379 aa, Artificial Sequence
  Synthetic Sequence
SPSPVPGSQNVPAPAVKKISQYACQRRTTLNNYNQLFTDALDILAENDELRENEGSALAFMRASSVLKSLPFPITSMKDTEGIPSLGDKVKSIIEGIIEDGESSEAKAVLNDERYKSFKLFCSVFGVGLKTAEKWFRMGFRTLSKIQSDKSLRFTQMQKAGFLYYEDLVSAVNRPEAEAVSMLVKEAVVTFLPDALVTMTGGFRRGKMTGHDVDFLITSPEATEDEEQQLLHKVTDFWKQQGLLLYADILESTFEKFKQPSRKVDALDHFQKCFLILKLDHGRVHSEKSGQQEGKGWKAIRVDLVMSPYDRRAFALLGWTGSRQFERDLRRYATHERKMMLDNHALYDRTKRVFLEAESEEEIFAHLGLDYIEPWERNA

SEQ ID NO: 7 - protein, 379 aa, Artificial Sequence
  Synthetic Sequence
SPSPVPGSQNVPAPAVKKISQYACQRRTTLNNYNQLFTDALDILAENDELRENEGSALAFMRASSVLKSLPFPITSMKDTEGIPSLGDKVKSIIEGIIEDGESSEAKAVLNDERYKSFKLFTSVFGVGLKTAEKWFRMGFRTLSKIQSDKSLRFTQMQKAGFLYYEDLVSCVNRPEAEAVSMLVKEAVVTFLPDALVTMTGGFRRGKMTGHDVDFLITSPEATEDEEQQLLHKVTDFWKQQGLLLYADILESTFEKFKQPSRKVDALDHFQKCFLILKLDHGRVHSEKSGQQEGKGWKAIRVDLVMSPYDRRAFALLGWTGSRQFERDLRRYATHERKMMLDNHALYDRTKRVFLEAESEEEIFAHLGLDYIEPWERNA

SEQ ID NO: 8 - DNA, 10 bp, Artificial Sequence
  Synthetic Sequence
gaatgcacga

SEQ ID NO: 9 - DNA, 10 bp, Artificial Sequence
  Synthetic Sequence
aagactatag

SEQ ID NO: 10 - DNA, 10 bp, Artificial Sequence
  Synthetic Sequence
tcggcagcaa

SEQ ID NO: 11 - DNA, 10 bp, Artificial Sequence
  Synthetic Sequence
ctaatgatgg

SEQ ID NO: 12 - DNA, 10 bp, Artificial Sequence
  Synthetic Sequence
ggttgcctct

SEQ ID NO: 13 - DNA, 10 bp, Artificial Sequence
  Synthetic Sequence
cgcacatggc

SEQ ID NO: 14 - DNA, 10 bp, Artificial Sequence
  Synthetic Sequence
cggcaatgga

SEQ ID NO: 15 - DNA, 10 bp, Artificial Sequence
  Synthetic Sequence
gccgtaaccg

SEQ ID NO: 16 - DNA, 10 bp, Artificial Sequence
  Synthetic Sequence
aaccattctc

SEQ ID NO: 17 - DNA, 10 bp, Artificial Sequence
  Synthetic Sequence
ggttgcctct

SEQ ID NO: 18 - DNA, 10 bp, Artificial Sequence
  Synthetic Sequence
ctaatgatgg

SEQ ID NO: 19 - DNA, 10 bp, Artificial Sequence
  Synthetic Sequence
tcggcctatc

SEQ ID NO: 20 - DNA, 10 bp, Artificial Sequence
  Synthetic Sequence
tttaacgtcc

SEQ ID NO: 21 - DNA, 10 bp, Artificial Sequence
  Synthetic Sequence
cgcttgagat

SEQ ID NO: 22 - DNA, 10 bp, Artificial Sequence
  Synthetic Sequence
aatatggagt

SEQ ID NO: 23 - DNA, 10 bp, Artificial Sequence
  Synthetic Sequence
gttgtcctgg

SEQ ID NO: 24 - DNA, 10 bp, Artificial Sequence
  Synthetic Sequence
ctacacgata

SEQ ID NO: 25 - DNA, 10 bp, Artificial Sequence
  Synthetic Sequence
tgaacctaac

SEQ ID NO: 26 - DNA, 10 bp, Artificial Sequence
  Synthetic Sequence
gggaattaga

SEQ ID NO: 27 - DNA, 10 bp, Artificial Sequence
  Synthetic Sequence
gagacgtgaa

SEQ ID NO: 28 - DNA, 10 bp, Artificial Sequence
  Synthetic Sequence
gctccctctc

SEQ ID NO: 29 - DNA, 10 bp, Artificial Sequence
  Synthetic Sequence
cttgagaaca

SEQ ID NO: 30 - DNA, 10 bp, Artificial Sequence
  Synthetic Sequence
aactcgtcca

SEQ ID NO: 31 - DNA, 10 bp, Artificial Sequence
  Synthetic Sequence
actagtaatc

SEQ ID NO: 32 - DNA, 10 bp, Artificial Sequence
  Synthetic Sequence
tcaactcaat

SEQ ID NO: 33 - DNA, 10 bp, Artificial Sequence
  Synthetic Sequence
ctccacctct

SEQ ID NO: 34 - DNA, 10 bp, Artificial Sequence
  Synthetic Sequence
cggccgattt

SEQ ID NO: 35 - DNA, 10 bp, Artificial Sequence
  Synthetic Sequence
gcaatatggt

SEQ ID NO: 36 - DNA, 10 bp, Artificial Sequence
  Synthetic Sequence
aatgcactgg

SEQ ID NO: 37 - DNA, 10 bp, Artificial Sequence
  Synthetic Sequence
agatacggcg

SEQ ID NO: 38 - DNA, 10 bp, Artificial Sequence
  Synthetic Sequence
gctaatgttc

SEQ ID NO: 39 - DNA, 10 bp, Artificial Sequence
  Synthetic Sequence
caaactatcg

SEQ ID NO: 40 - DNA, 10 bp, Artificial Sequence
  Synthetic Sequence
gttcagaggc

SEQ ID NO: 41 - DNA, 10 bp, Artificial Sequence
  Synthetic Sequence
agctaagcca

SEQ ID NO: 42 - DNA, 10 bp, Artificial Sequence
  Synthetic Sequence
cgattatgtg

SEQ ID NO: 43 - DNA, 10 bp, Artificial Sequence
  Synthetic Sequence
ccagctagca

SEQ ID NO: 44 - DNA, 10 bp, Artificial Sequence
  Synthetic Sequence
tcacattgcg

SEQ ID NO: 45 - DNA, 10 bp, Artificial Sequence
  Synthetic Sequence
agtagaatcc

SEQ ID NO: 46 - DNA, 10 bp, Artificial Sequence
  Synthetic Sequence
agtagcccag

SEQ ID NO: 47 - DNA, 10 bp, Artificial Sequence
  Synthetic Sequence
gctgaatgcg

SEQ ID NO: 48 - DNA, 10 bp, Artificial Sequence
  Synthetic Sequence
ctacctattc

SEQ ID NO: 49 - DNA, 10 bp, Artificial Sequence
  Synthetic Sequence
gcccttcgga

SEQ ID NO: 50 - DNA, 10 bp, Artificial Sequence
  Synthetic Sequence
ggaggagaat

SEQ ID NO: 51 - DNA, 10 bp, Artificial Sequence
  Synthetic Sequence
atccgcctgc

SEQ ID NO: 52 - DNA, 10 bp, Artificial Sequence
  Synthetic Sequence
gtgggacgat

SEQ ID NO: 53 - DNA, 10 bp, Artificial Sequence
  Synthetic Sequence
tacagaatgg

SEQ ID NO: 54 - DNA, 10 bp, Artificial Sequence
  Synthetic Sequence
tccctgtcag

SEQ ID NO: 55 - DNA, 10 bp, Artificial Sequence
  Synthetic Sequence
ctacgtagtt

SEQ ID NO: 56 - DNA, 10 bp, Artificial Sequence
  Synthetic Sequence
attactgaag

SEQ ID NO: 57 - DNA, 10 bp, Artificial Sequence
  Synthetic Sequence
atttcgagaa

SEQ ID NO: 58 - DNA, 10 bp, Artificial Sequence
  Synthetic Sequence
agggctgttt

SEQ ID NO: 59 - DNA, 10 bp, Artificial Sequence
  Synthetic Sequence
ttacagcggt

SEQ ID NO: 60 - DNA, 10 bp, Artificial Sequence
  Synthetic Sequence
gagtatgaga

SEQ ID NO: 61 - DNA, 10 bp, Artificial Sequence
  Synthetic Sequence
ggtactatcg

SEQ ID NO: 62 - DNA, 10 bp, Artificial Sequence
  Synthetic Sequence
tactggccga

SEQ ID NO: 63 - DNA, 10 bp, Artificial Sequence
  Synthetic Sequence
catagtgccg

SEQ ID NO: 64 - DNA, 10 bp, Artificial Sequence
  Synthetic Sequence
tgacgctatg

SEQ ID NO: 65 - DNA, 10 bp, Artificial Sequence
  Synthetic Sequence
ccgaacaagg

SEQ ID NO: 66 - DNA, 10 bp, Artificial Sequence
  Synthetic Sequence
gtggtaccac

SEQ ID NO: 67 - DNA, 10 bp, Artificial Sequence
  Synthetic Sequence
caacgtatcc

SEQ ID NO: 68 - DNA, 10 bp, Artificial Sequence
  Synthetic Sequence
taagattaca

SEQ ID NO: 69 - DNA, 10 bp, Artificial Sequence
  Synthetic Sequence
ttggaagaat

SEQ ID NO: 70 - DNA, 10 bp, Artificial Sequence
  Synthetic Sequence
caggtcgagt

SEQ ID NO: 71 - DNA, 10 bp, Artificial Sequence
  Synthetic Sequence
aagcacgtcg

SEQ ID NO: 72 - DNA, 10 bp, Artificial Sequence
  Synthetic Sequence
ccaaagcatc

SEQ ID NO: 73 - DNA, 10 bp, Artificial Sequence
  Synthetic Sequence
actctgaatc

SEQ ID NO: 74 - DNA, 10 bp, Artificial Sequence
  Synthetic Sequence
caggtacgag

SEQ ID NO: 75 - DNA, 10 bp, Artificial Sequence
  Synthetic Sequence
ggtaatcaag

SEQ ID NO: 76 - DNA, 10 bp, Artificial Sequence
  Synthetic Sequence
ctgtgcatcc

SEQ ID NO: 77 - DNA, 10 bp, Artificial Sequence
  Synthetic Sequence
ctcagctgct

SEQ ID NO: 78 - DNA, 10 bp, Artificial Sequence
  Synthetic Sequence
cactagcctt

SEQ ID NO: 79 - DNA, 10 bp, Artificial Sequence
  Synthetic Sequence
aggatcctgg

SEQ ID NO: 80 - DNA, 10 bp, Artificial Sequence
  Synthetic Sequence
aagtataagc

SEQ ID NO: 81 - DNA, 10 bp, Artificial Sequence
  Synthetic Sequence
acaaagtaat

SEQ ID NO: 82 - DNA, 10 bp, Artificial Sequence
  Synthetic Sequence
ttgacaatga

SEQ ID NO: 83 - DNA, 10 bp, Artificial Sequence
  Synthetic Sequence
agtcatacaa

SEQ ID NO: 84 - DNA, 10 bp, Artificial Sequence
  Synthetic Sequence
agggtgcgag

SEQ ID NO: 85 - DNA, 10 bp, Artificial Sequence
  Synthetic Sequence
aacgctcggt

SEQ ID NO: 86 - DNA, 10 bp, Artificial Sequence
  Synthetic Sequence
tctgagcatc

SEQ ID NO: 87 - DNA, 10 bp, Artificial Sequence
  Synthetic Sequence
ccactcgttc

SEQ ID NO: 88 - DNA, 10 bp, Artificial Sequence
  Synthetic Sequence
tccgaaataa

SEQ ID NO: 89 - DNA, 10 bp, Artificial Sequence
  Synthetic Sequence
gagaaccgcc

SEQ ID NO: 90 - DNA, 10 bp, Artificial Sequence
  Synthetic Sequence
gctgccttgc

SEQ ID NO: 91 - DNA, 10 bp, Artificial Sequence
  Synthetic Sequence
gaacgttaca

SEQ ID NO: 92 - DNA, 10 bp, Artificial Sequence
  Synthetic Sequence
gtctgcagtt

SEQ ID NO: 93 - DNA, 10 bp, Artificial Sequence
  Synthetic Sequence
attgtggaca

SEQ ID NO: 94 - DNA, 10 bp, Artificial Sequence
  Synthetic Sequence
tccgcttggg

SEQ ID NO: 95 - DNA, 10 bp, Artificial Sequence
  Synthetic Sequence
gtaaataatt

SEQ ID NO: 96 - DNA, 10 bp, Artificial Sequence
  Synthetic Sequence
gacgttccac

SEQ ID NO: 97 - DNA, 10 bp, Artificial Sequence
  Synthetic Sequence
cttcgattca

SEQ ID NO: 98 - DNA, 10 bp, Artificial Sequence
  Synthetic Sequence
gggttccatt

SEQ ID NO: 99 - DNA, 10 bp, Artificial Sequence
  Synthetic Sequence
tccagacgtg

SEQ ID NO: 100 - DNA, 10 bp, Artificial Sequence
  Synthetic Sequence
catcgcccaa

SEQ ID NO: 101 - DNA, 10 bp, Artificial Sequence
  Synthetic Sequence
ggaatggcgg

SEQ ID NO: 102 - DNA, 10 bp, Artificial Sequence
  Synthetic Sequence
ataaggcttc

SEQ ID NO: 103 - DNA, 10 bp, Artificial Sequence
  Synthetic Sequence
aatagagcga

SEQ ID NO: 104 - DNA, 10 bp, Artificial Sequence
  Synthetic Sequence
aaccagttca

SEQ ID NO: 105 - DNA, 10 bp, Artificial Sequence
  Synthetic Sequence
taacttggcc

SEQ ID NO: 106 - DNA, 10 bp, Artificial Sequence
  Synthetic Sequence
accgccattt

SEQ ID NO: 107 - DNA, 10 bp, Artificial Sequence
  Synthetic Sequence
catcagcagg

SEQ ID NO: 108 - DNA, 10 bp, Artificial Sequence
  Synthetic Sequence
actaaaggcg

SEQ ID NO: 109 - DNA, 10 bp, Artificial Sequence
  Synthetic Sequence
tattctcccg

SEQ ID NO: 110 - DNA, 10 bp, Artificial Sequence
  Synthetic Sequence
ctgtagagag

SEQ ID NO: 111 - DNA, 10 bp, Artificial Sequence
  Synthetic Sequence
tggagtgaat

SEQ ID NO: 112 - DNA, 10 bp, Artificial Sequence
  Synthetic Sequence
atgaaatggc

SEQ ID NO: 113 - DNA, 10 bp, Artificial Sequence
  Synthetic Sequence
gatgacaaga

SEQ ID NO: 114 - DNA, 10 bp, Artificial Sequence
  Synthetic Sequence
atccgatgag

SEQ ID NO: 115 - DNA, 10 bp, Artificial Sequence
  Synthetic Sequence
tctctcatgc

SEQ ID NO: 116 - DNA, 10 bp, Artificial Sequence
  Synthetic Sequence
tagctttcat

SEQ ID NO: 117 - DNA, 10 bp, Artificial Sequence
  Synthetic Sequence
cgtgaatgcc

SEQ ID NO: 118 - DNA, 10 bp, Artificial Sequence
  Synthetic Sequence
gagttcggtc

SEQ ID NO: 119 - DNA, 10 bp, Artificial Sequence
  Synthetic Sequence
tctgtctgtc

SEQ ID NO: 120 - DNA, 10 bp, Artificial Sequence
  Synthetic Sequence
aagaaacacg

SEQ ID NO: 121 - DNA, 10 bp, Artificial Sequence
  Synthetic Sequence
gaggccaaat

SEQ ID NO: 122 - DNA, 10 bp, Artificial Sequence
  Synthetic Sequence
gcaaagttag

SEQ ID NO: 123 - DNA, 10 bp, Artificial Sequence
  Synthetic Sequence
actagggtgt

SEQ ID NO: 124 - DNA, 10 bp, Artificial Sequence
  Synthetic Sequence
tcttcacttg

SEQ ID NO: 125 - DNA, 10 bp, Artificial Sequence
  Synthetic Sequence
aattacagat

SEQ ID NO: 126 - DNA, 10 bp, Artificial Sequence
  Synthetic Sequence
agcacgggtc

SEQ ID NO: 127 - DNA, 10 bp, Artificial Sequence
  Synthetic Sequence
aatggatact

SEQ ID NO: 128 - DNA, 10 bp, Artificial Sequence
  Synthetic Sequence
ctatgtatca

SEQ ID NO: 129 - DNA, 10 bp, Artificial Sequence
  Synthetic Sequence
atcagctgaa

SEQ ID NO: 130 - DNA, 10 bp, Artificial Sequence
  Synthetic Sequence
agacgactga

SEQ ID NO: 131 - DNA, 10 bp, Artificial Sequence
  Synthetic Sequence
cgtctgataa

SEQ ID NO: 132 - DNA, 10 bp, Artificial Sequence
  Synthetic Sequence
tccagaggat

SEQ ID NO: 133 - DNA, 10 bp, Artificial Sequence
  Synthetic Sequence
gtagcgttga

SEQ ID NO: 134 - DNA, 10 bp, Artificial Sequence
  Synthetic Sequence
gttcgcggaa

SEQ ID NO: 135 - DNA, 10 bp, Artificial Sequence
  Synthetic Sequence
catacggcgt

SEQ ID NO: 136 - DNA, 10 bp, Artificial Sequence
  Synthetic Sequence
tggtgcttta

SEQ ID NO: 137 - DNA, 10 bp, Artificial Sequence
  Synthetic Sequence
agagcattga

SEQ ID NO: 138 - DNA, 10 bp, Artificial Sequence
  Synthetic Sequence
acttactgta

SEQ ID NO: 139 - DNA, 10 bp, Artificial Sequence
  Synthetic Sequence
tactccgtca

SEQ ID NO: 140 - DNA, 10 bp, Artificial Sequence
  Synthetic Sequence
agggcgtacg

SEQ ID NO: 141 - DNA, 10 bp, Artificial Sequence
  Synthetic Sequence
ggttctacat

SEQ ID NO: 142 - DNA, 10 bp, Artificial Sequence
  Synthetic Sequence
cacgacattg

SEQ ID NO: 143 - DNA, 10 bp, Artificial Sequence
  Synthetic Sequence
gctgcatgtc

SEQ ID NO: 144 - DNA, 10 bp, Artificial Sequence
  Synthetic Sequence
tgttcaacaa

SEQ ID NO: 145 - DNA, 10 bp, Artificial Sequence
  Synthetic Sequence
atagtgactt

SEQ ID NO: 146 - DNA, 10 bp, Artificial Sequence
  Synthetic Sequence
tgcgaccaca

SEQ ID NO: 147 - DNA, 10 bp, Artificial Sequence
  Synthetic Sequence
gtggtagcgg

SEQ ID NO: 148 - DNA, 10 bp, Artificial Sequence
  Synthetic Sequence
tcgggctgac

SEQ ID NO: 149 - DNA, 10 bp, Artificial Sequence
  Synthetic Sequence
cagctcgtgg

SEQ ID NO: 150 - DNA, 10 bp, Artificial Sequence
  Synthetic Sequence
gtcagaggac

SEQ ID NO: 151 - DNA, 10 bp, Artificial Sequence
  Synthetic Sequence
ggtggcaata

SEQ ID NO: 152 - DNA, 10 bp, Artificial Sequence
  Synthetic Sequence
cccttagcac

SEQ ID NO: 153 - DNA, 10 bp, Artificial Sequence
  Synthetic Sequence
tctaccagtt

SEQ ID NO: 154 - DNA, 10 bp, Artificial Sequence
  Synthetic Sequence
gatgagcaaa

SEQ ID NO: 155 - DNA, 10 bp, Artificial Sequence
  Synthetic Sequence
acgctagccg

SEQ ID NO: 156 - DNA, 10 bp, Artificial Sequence
  Synthetic Sequence
atgtggaggt

SEQ ID NO: 157 - DNA, 10 bp, Artificial Sequence
  Synthetic Sequence
ctaccacaga

SEQ ID NO: 158 - DNA, 10 bp, Artificial Sequence
  Synthetic Sequence
gcctaaccag

SEQ ID NO: 159 - DNA, 10 bp, Artificial Sequence
  Synthetic Sequence
cctgatgacg

SEQ ID NO: 160 - DNA, 10 bp, Artificial Sequence
  Synthetic Sequence
tcaactgagg

SEQ ID NO: 161 - DNA, 10 bp, Artificial Sequence
  Synthetic Sequence
tgtgacaagc

SEQ ID NO: 162 - DNA, 10 bp, Artificial Sequence
  Synthetic Sequence
cacatagcat

SEQ ID NO: 163 - DNA, 10 bp, Artificial Sequence
  Synthetic Sequence
cgaacatcac

SEQ ID NO: 164 - DNA, 10 bp, Artificial Sequence
  Synthetic Sequence
actaagacgt

SEQ ID NO: 165 - DNA, 10 bp, Artificial Sequence
  Synthetic Sequence
ggaaaggtct

SEQ ID NO: 166 - DNA, 10 bp, Artificial Sequence
  Synthetic Sequence
acatctagcg

SEQ ID NO: 167 - DNA, 10 bp, Artificial Sequence
  Synthetic Sequence
catggccaca

SEQ ID NO: 168 - DNA, 10 bp, Artificial Sequence
  Synthetic Sequence
cgggcagata

SEQ ID NO: 169 - DNA, 10 bp, Artificial Sequence
  Synthetic Sequence
attggcataa

SEQ ID NO: 170 - DNA, 10 bp, Artificial Sequence
  Synthetic Sequence
cccagtataa

SEQ ID NO: 171 - DNA, 10 bp, Artificial Sequence
  Synthetic Sequence
acggctgcct

SEQ ID NO: 172 - DNA, 10 bp, Artificial Sequence
  Synthetic Sequence
cacgcttcat

SEQ ID NO: 173 - DNA, 10 bp, Artificial Sequence
  Synthetic Sequence
aagtcactaa

SEQ ID NO: 174 - DNA, 10 bp, Artificial Sequence
  Synthetic Sequence
caggctcgct

SEQ ID NO: 175 - DNA, 10 bp, Artificial Sequence
  Synthetic Sequence
ttcaatgctc

SEQ ID NO: 176 - DNA, 10 bp, Artificial Sequence
  Synthetic Sequence
gaacgattcc

SEQ ID NO: 177 - DNA, 10 bp, Artificial Sequence
  Synthetic Sequence
cccttaatgc

SEQ ID NO: 178 - DNA, 10 bp, Artificial Sequence
  Synthetic Sequence
cagcaagcga

SEQ ID NO: 179 - DNA, 10 bp, Artificial Sequence
  Synthetic Sequence
taagataatt

SEQ ID NO: 180 - DNA, 10 bp, Artificial Sequence
  Synthetic Sequence
ctgaagggat

SEQ ID NO: 181 - DNA, 10 bp, Artificial Sequence
  Synthetic Sequence
ttccttccac

SEQ ID NO: 182 - DNA, 10 bp, Artificial Sequence
  Synthetic Sequence
atccattggt

SEQ ID NO: 183 - DNA, 10 bp, Artificial Sequence
  Synthetic Sequence
tgatcggccc

SEQ ID NO: 184 - DNA, 10 bp, Artificial Sequence
  Synthetic Sequence
cgatcggttc

SEQ ID NO: 185 - DNA, 10 bp, Artificial Sequence
  Synthetic Sequence
cagtactacg

SEQ ID NO: 186 - DNA, 10 bp, Artificial Sequence
  Synthetic Sequence
caggtacatt

SEQ ID NO: 187 - DNA, 10 bp, Artificial Sequence
  Synthetic Sequence
agtgctccgt

SEQ ID NO: 188 - DNA, 10 bp, Artificial Sequence
  Synthetic Sequence
ctggacactt

SEQ ID NO: 189 - DNA, 10 bp, Artificial Sequence
  Synthetic Sequence
agaacctagt

SEQ ID NO: 190 - DNA, 10 bp, Artificial Sequence
  Synthetic Sequence
ggctgtgatg

SEQ ID NO: 191 - DNA, 10 bp, Artificial Sequence
  Synthetic Sequence
aacatctagc

SEQ ID NO: 192 - DNA, 10 bp, Artificial Sequence
  Synthetic Sequence
ttgccacgtc

SEQ ID NO: 193 - DNA, 10 bp, Artificial Sequence
  Synthetic Sequence
agaagacgtc

SEQ ID NO: 194 - DNA, 10 bp, Artificial Sequence
  Synthetic Sequence
ggattccgct

SEQ ID NO: 195 - DNA, 10 bp, Artificial Sequence
  Synthetic Sequence
ccgtgtagat

SEQ ID NO: 196 - DNA, 10 bp, Artificial Sequence
  Synthetic Sequence
tcacggtgag

SEQ ID NO: 197 - DNA, 10 bp, Artificial Sequence
  Synthetic Sequence
cggagtccgt

SEQ ID NO: 198 - DNA, 10 bp, Artificial Sequence
  Synthetic Sequence
tataacgaca

SEQ ID NO: 199 - DNA, 10 bp, Artificial Sequence
  Synthetic Sequence
accaaacaga

SEQ ID NO: 200 - DNA, 10 bp, Artificial Sequence
  Synthetic Sequence
catctatggg

SEQ ID NO: 201 - DNA, 10 bp, Artificial Sequence
  Synthetic Sequence
tcgtacctcc

SEQ ID NO: 202 - DNA, 10 bp, Artificial Sequence
  Synthetic Sequence
caaagcgcgg

SEQ ID NO: 203 - DNA, 10 bp, Artificial Sequence
  Synthetic Sequence
ggatgcaatg

SEQ ID NO: 204 - DNA, 10 bp, Artificial Sequence
  Synthetic Sequence
ctgagtccag

SEQ ID NO: 205 - DNA, 10 bp, Artificial Sequence
  Synthetic Sequence
attaattcgg

SEQ ID NO: 206 - DNA, 10 bp, Artificial Sequence
  Synthetic Sequence
tttcctggaa

SEQ ID NO: 207 - DNA, 10 bp, Artificial Sequence
  Synthetic Sequence
actcagatag

SEQ ID NO: 208 - DNA, 10 bp, Artificial Sequence
  Synthetic Sequence
gtttgtcaac

SEQ ID NO: 209 - DNA, 10 bp, Artificial Sequence
  Synthetic Sequence
gcgctagagg

SEQ ID NO: 210 - DNA, 10 bp, Artificial Sequence
  Synthetic Sequence
cttatcgagc

SEQ ID NO: 211 - DNA, 10 bp, Artificial Sequence
  Synthetic Sequence
ttcgtgatat

SEQ ID NO: 212 - DNA, 10 bp, Artificial Sequence
  Synthetic Sequence
ataacgtgct

SEQ ID NO: 213 - DNA, 10 bp, Artificial Sequence
  Synthetic Sequence
caagtcctag

SEQ ID NO: 214 - DNA, 10 bp, Artificial Sequence
  Synthetic Sequence
cctggtctct

SEQ ID NO: 215 - DNA, 10 bp, Artificial Sequence
  Synthetic Sequence
cgctgccctt

SEQ ID NO: 216 - DNA, 10 bp, Artificial Sequence
  Synthetic Sequence
agctctagag

SEQ ID NO: 217 - DNA, 10 bp, Artificial Sequence
  Synthetic Sequence
gctacgcctg

SEQ ID NO: 218 - DNA, 10 bp, Artificial Sequence
  Synthetic Sequence
tcctggaaac

SEQ ID NO: 219 - DNA, 10 bp, Artificial Sequence
  Synthetic Sequence
ccgtcgatat

SEQ ID NO: 220 - DNA, 10 bp, Artificial Sequence
  Synthetic Sequence
tcacaaatcc

SEQ ID NO: 221 - DNA, 10 bp, Artificial Sequence
  Synthetic Sequence
cacgaagaga

SEQ ID NO: 222 - DNA, 10 bp, Artificial Sequence
  Synthetic Sequence
gacgacctcc

SEQ ID NO: 223 - DNA, 10 bp, Artificial Sequence
  Synthetic Sequence
gttacttagt

SEQ ID NO: 224 - DNA, 10 bp, Artificial Sequence
  Synthetic Sequence
acacggagcc

SEQ ID NO: 225 - DNA, 10 bp, Artificial Sequence
  Synthetic Sequence
ctgctatcgt

SEQ ID NO: 226 - DNA, 10 bp, Artificial Sequence
  Synthetic Sequence
aggtgcggta

SEQ ID NO: 227 - DNA, 10 bp, Artificial Sequence
  Synthetic Sequence
atgcgcctct

SEQ ID NO: 228 - DNA, 10 bp, Artificial Sequence
  Synthetic Sequence
tatgaatcca

SEQ ID NO: 229 - DNA, 10 bp, Artificial Sequence
  Synthetic Sequence
cacggaaggt

SEQ ID NO: 230 - DNA, 10 bp, Artificial Sequence
  Synthetic Sequence
tactacggga

SEQ ID NO: 231 - DNA, 10 bp, Artificial Sequence
  Synthetic Sequence
ctccgcagag

SEQ ID NO: 232 - DNA, 10 bp, Artificial Sequence
  Synthetic Sequence
ggtcagatcc

SEQ ID NO: 233 - DNA, 10 bp, Artificial Sequence
  Synthetic Sequence
gagcttcgaa

SEQ ID NO: 234 - DNA, 10 bp, Artificial Sequence
  Synthetic Sequence
cgcctcagga

SEQ ID NO: 235 - DNA, 10 bp, Artificial Sequence
  Synthetic Sequence
tccactttcc

SEQ ID NO: 236 - DNA, 10 bp, Artificial Sequence
  Synthetic Sequence
tctgttaaac

SEQ ID NO: 237 - DNA, 10 bp, Artificial Sequence
  Synthetic Sequence
tagcgtgcaa

SEQ ID NO: 238 - DNA, 10 bp, Artificial Sequence
  Synthetic Sequence
gctgggtctt

SEQ ID NO: 239 - DNA, 10 bp, Artificial Sequence
  Synthetic Sequence
cacctccgta

SEQ ID NO: 240 - DNA, 10 bp, Artificial Sequence
  Synthetic Sequence
ggcaagagct

SEQ ID NO: 241 - DNA, 10 bp, Artificial Sequence
  Synthetic Sequence
gtgtgatatg

SEQ ID NO: 242 - DNA, 10 bp, Artificial Sequence
  Synthetic Sequence
tggcaaaggc

SEQ ID NO: 243 - DNA, 10 bp, Artificial Sequence
  Synthetic Sequence
agctgatcta

SEQ ID NO: 244 - DNA, 10 bp, Artificial Sequence
  Synthetic Sequence
tcagggccct

SEQ ID NO: 245 - DNA, 10 bp, Artificial Sequence
  Synthetic Sequence
atgcggcaca

SEQ ID NO: 246 - DNA, 10 bp, Artificial Sequence
  Synthetic Sequence
accctctatt

SEQ ID NO: 247 - DNA, 10 bp, Artificial Sequence
  Synthetic Sequence
ggccgaattt

SEQ ID NO: 248 - DNA, 10 bp, Artificial Sequence
  Synthetic Sequence
cctcgtagcc

SEQ ID NO: 249 - DNA, 10 bp, Artificial Sequence
  Synthetic Sequence
caagcaattt

SEQ ID NO: 250 - DNA, 10 bp, Artificial Sequence
  Synthetic Sequence
cattggttag

SEQ ID NO: 251 - DNA, 10 bp, Artificial Sequence
  Synthetic Sequence
gcgaatgcac

SEQ ID NO: 252 - DNA, 10 bp, Artificial Sequence
  Synthetic Sequence
tgcatgtgaa

SEQ ID NO: 253 - DNA, 10 bp, Artificial Sequence
  Synthetic Sequence
tacatatcga

SEQ ID NO: 254 - DNA, 10 bp, Artificial Sequence
  Synthetic Sequence
tggaggaaac

SEQ ID NO: 255 - DNA, 10 bp, Artificial Sequence
  Synthetic Sequence
cgcgcaaagg

SEQ ID NO: 256 - DNA, 10 bp, Artificial Sequence
  Synthetic Sequence
ttgccagcca

SEQ ID NO: 257 - DNA, 10 bp, Artificial Sequence
  Synthetic Sequence
aaccacgccc

SEQ ID NO: 258 - DNA, 10 bp, Artificial Sequence
  Synthetic Sequence
tgcaaacttg

SEQ ID NO: 259 - DNA, 10 bp, Artificial Sequence
  Synthetic Sequence
tcttaatgag

SEQ ID NO: 260 - DNA, 10 bp, Artificial Sequence
  Synthetic Sequence
ccgcattcca

SEQ ID NO: 261 - DNA, 10 bp, Artificial Sequence
  Synthetic Sequence
ctctggctga

SEQ ID NO: 262 - DNA, 10 bp, Artificial Sequence
  Synthetic Sequence
aaactccgcg

SEQ ID NO: 263 - DNA, 10 bp, Artificial Sequence
  Synthetic Sequence
catgcatgtt

SEQ ID NO: 264 - DNA, 10 bp, Artificial Sequence
  Synthetic Sequence
ggccctttgc

SEQ ID NO: 265 - DNA, 10 bp, Artificial Sequence
  Synthetic Sequence
gcaccgagtg

SEQ ID NO: 266 - DNA, 10 bp, Artificial Sequence
  Synthetic Sequence
accgaccaag

SEQ ID NO: 267 - DNA, 10 bp, Artificial Sequence
  Synthetic Sequence
cagaattgga

SEQ ID NO: 268 - DNA, 10 bp, Artificial Sequence
  Synthetic Sequence
ggcaccgatt

SEQ ID NO: 269 - DNA, 10 bp, Artificial Sequence
  Synthetic Sequence
gggaggttga

SEQ ID NO: 270 - DNA, 10 bp, Artificial Sequence
  Synthetic Sequence
gaaacggaaa

SEQ ID NO: 271 - DNA, 10 bp, Artificial Sequence
  Synthetic Sequence
aattatatac

SEQ ID NO: 272 - DNA, 10 bp, Artificial Sequence
  Synthetic Sequence
gtacatacga

SEQ ID NO: 273 - DNA, 10 bp, Artificial Sequence
  Synthetic Sequence
acgtccttgt

SEQ ID NO: 274 - DNA, 10 bp, Artificial Sequence
  Synthetic Sequence
atgtggctac

SEQ ID NO: 275 - DNA, 10 bp, Artificial Sequence
  Synthetic Sequence
caagagacat

SEQ ID NO: 276 - DNA, 10 bp, Artificial Sequence
  Synthetic Sequence
ggcccgactt

SEQ ID NO: 277 - DNA, 10 bp, Artificial Sequence
  Synthetic Sequence
acattgtgta

SEQ ID NO: 278 - DNA, 10 bp, Artificial Sequence
  Synthetic Sequence
tattcattcg

SEQ ID NO: 279 - DNA, 10 bp, Artificial Sequence
  Synthetic Sequence
gagtcgattg

SEQ ID NO: 280 - DNA, 10 bp, Artificial Sequence
  Synthetic Sequence
ttcggtctaa

SEQ ID NO: 281 - DNA, 10 bp, Artificial Sequence
  Synthetic Sequence
aacagttcgc

SEQ ID NO: 282 - DNA, 10 bp, Artificial Sequence
  Synthetic Sequence
acaaccgaag

SEQ ID NO: 283 - DNA, 10 bp, Artificial Sequence
  Synthetic Sequence
acatgcgata

SEQ ID NO: 284 - DNA, 10 bp, Artificial Sequence
  Synthetic Sequence
gcagtacagg

SEQ ID NO: 285 - DNA, 10 bp, Artificial Sequence
  Synthetic Sequence
aagagcacgt

SEQ ID NO: 286 - DNA, 10 bp, Artificial Sequence
  Synthetic Sequence
actcagagca

SEQ ID NO: 287 - DNA, 10 bp, Artificial Sequence
  Synthetic Sequence
acaatgacgg

SEQ ID NO: 288 - DNA, 10 bp, Artificial Sequence
  Synthetic Sequence
cacctgttag

SEQ ID NO: 289 - DNA, 10 bp, Artificial Sequence
  Synthetic Sequence
gctgtttcca

SEQ ID NO: 290 - DNA, 10 bp, Artificial Sequence
  Synthetic Sequence
tggttgcgac

SEQ ID NO: 291 - DNA, 10 bp, Artificial Sequence
  Synthetic Sequence
gggaaactcc

SEQ ID NO: 292 - DNA, 10 bp, Artificial Sequence
  Synthetic Sequence
taaatcgcgc

SEQ ID NO: 293 - DNA, 10 bp, Artificial Sequence
  Synthetic Sequence
gtctgacggc

SEQ ID NO: 294 - DNA, 10 bp, Artificial Sequence
  Synthetic Sequence
gcccagccaa

SEQ ID NO: 295 - DNA, 10 bp, Artificial Sequence
  Synthetic Sequence
catagagata

SEQ ID NO: 296 - DNA, 10 bp, Artificial Sequence
  Synthetic Sequence
tagtcggctc

SEQ ID NO: 297 - DNA, 10 bp, Artificial Sequence
  Synthetic Sequence
tagaacacaa

SEQ ID NO: 298 - DNA, 10 bp, Artificial Sequence
  Synthetic Sequence
ggtcgtattg

SEQ ID NO: 299 - DNA, 10 bp, Artificial Sequence
  Synthetic Sequence
tcgttatttg

SEQ ID NO: 300 - DNA, 10 bp, Artificial Sequence
  Synthetic Sequence
aaacattgtg

SEQ ID NO: 301 - DNA, 10 bp, Artificial Sequence
  Synthetic Sequence
agcgcatgat

SEQ ID NO: 302 - DNA, 10 bp, Artificial Sequence
  Synthetic Sequence
tcgtatactt

SEQ ID NO: 303 - DNA, 10 bp, Artificial Sequence
  Synthetic Sequence
tgccattgcc

SEQ ID NO: 304 - DNA, 10 bp, Artificial Sequence
  Synthetic Sequence
ggaacgttat

SEQ ID NO: 305 - DNA, 10 bp, Artificial Sequence
  Synthetic Sequence
tcagagacac

SEQ ID NO: 306 - DNA, 10 bp, Artificial Sequence
  Synthetic Sequence
ggtccttcca

SEQ ID NO: 307 - DNA, 10 bp, Artificial Sequence
  Synthetic Sequence
cgcgggattt

SEQ ID NO: 308 - DNA, 10 bp, Artificial Sequence
  Synthetic Sequence
acctggtggt

SEQ ID NO: 309 - DNA, 10 bp, Artificial Sequence
  Synthetic Sequence
atttgctaac

SEQ ID NO: 310 - DNA, 10 bp, Artificial Sequence
  Synthetic Sequence
gctcctcgaa

SEQ ID NO: 311 - DNA, 10 bp, Artificial Sequence
  Synthetic Sequence
tacctgctga

SEQ ID NO: 312 - DNA, 10 bp, Artificial Sequence
  Synthetic Sequence
ggccttagat

SEQ ID NO: 313 - DNA, 10 bp, Artificial Sequence
  Synthetic Sequence
gaatgcctca

SEQ ID NO: 314 - DNA, 10 bp, Artificial Sequence
  Synthetic Sequence
tgacctcctc

SEQ ID NO: 315 - DNA, 10 bp, Artificial Sequence
  Synthetic Sequence
tgcggtcgta

SEQ ID NO: 316 - DNA, 10 bp, Artificial Sequence
  Synthetic Sequence
tattacgtgc

SEQ ID NO: 317 - DNA, 10 bp, Artificial Sequence
  Synthetic Sequence
tattaaacct

SEQ ID NO: 318 - DNA, 10 bp, Artificial Sequence
  Synthetic Sequence
ccatgttcac

SEQ ID NO: 319 - DNA, 10 bp, Artificial Sequence
  Synthetic Sequence
tgaagtggta

SEQ ID NO: 320 - DNA, 10 bp, Artificial Sequence
  Synthetic Sequence
tccgagccta

SEQ ID NO: 321 - DNA, 10 bp, Artificial Sequence
  Synthetic Sequence
tcttagcaca

SEQ ID NO: 322 - DNA, 10 bp, Artificial Sequence
  Synthetic Sequence
gttcacaatg

SEQ ID NO: 323 - DNA, 10 bp, Artificial Sequence
  Synthetic Sequence
acacagtgct

SEQ ID NO: 324 - DNA, 10 bp, Artificial Sequence
  Synthetic Sequence
acaccacggg

SEQ ID NO: 325 - DNA, 10 bp, Artificial Sequence
  Synthetic Sequence
agtttaatat

SEQ ID NO: 326 - DNA, 10 bp, Artificial Sequence
  Synthetic Sequence
tgatcattca

SEQ ID NO: 327 - DNA, 10 bp, Artificial Sequence
  Synthetic Sequence
attgggtcca

SEQ ID NO: 328 - DNA, 10 bp, Artificial Sequence
  Synthetic Sequence
tcatgctacc

SEQ ID NO: 329 - DNA, 10 bp, Artificial Sequence
  Synthetic Sequence
atgtccattg

SEQ ID NO: 330 - DNA, 10 bp, Artificial Sequence
  Synthetic Sequence
aacaagtcgg

SEQ ID NO: 331 - DNA, 10 bp, Artificial Sequence
  Synthetic Sequence
tcaatcctac

SEQ ID NO: 332 - DNA, 10 bp, Artificial Sequence
  Synthetic Sequence
cattaagggt

SEQ ID NO: 333 - DNA, 10 bp, Artificial Sequence
  Synthetic Sequence
gtgaacggtc

SEQ ID NO: 334 - DNA, 10 bp, Artificial Sequence
  Synthetic Sequence
cggtctgaaa

SEQ ID NO: 335 - DNA, 10 bp, Artificial Sequence
  Synthetic Sequence
ctggaaattc

SEQ ID NO: 336 - DNA, 10 bp, Artificial Sequence
  Synthetic Sequence
cacgaacccg

SEQ ID NO: 337 - DNA, 10 bp, Artificial Sequence
  Synthetic Sequence
ggtggttgac

SEQ ID NO: 338 - DNA, 10 bp, Artificial Sequence
  Synthetic Sequence
ctcgttaagc

SEQ ID NO: 339 - DNA, 10 bp, Artificial Sequence
  Synthetic Sequence
ccagctgaga

SEQ ID NO: 340 - DNA, 10 bp, Artificial Sequence
  Synthetic Sequence
gtatctgtgt

SEQ ID NO: 341 - DNA, 10 bp, Artificial Sequence
  Synthetic Sequence
gagtttagac

SEQ ID NO: 342 - DNA, 10 bp, Artificial Sequence
  Synthetic Sequence
gtcgcttcca

SEQ ID NO: 343 - DNA, 10 bp, Artificial Sequence
  Synthetic Sequence
tgactggttt

SEQ ID NO: 344 - DNA, 10 bp, Artificial Sequence
  Synthetic Sequence
agatctaact

SEQ ID NO: 345 - DNA, 10 bp, Artificial Sequence
  Synthetic Sequence
catgtcacta

SEQ ID NO: 346 - DNA, 10 bp, Artificial Sequence
  Synthetic Sequence
cgcgattgcg

SEQ ID NO: 347 - DNA, 10 bp, Artificial Sequence
  Synthetic Sequence
ccatcaagct

SEQ ID NO: 348 - DNA, 10 bp, Artificial Sequence
  Synthetic Sequence
ggtacaagtc

SEQ ID NO: 349 - DNA, 10 bp, Artificial Sequence
  Synthetic Sequence
acccgaattg

SEQ ID NO: 350 - DNA, 10 bp, Artificial Sequence
  Synthetic Sequence
gcatacgagg

SEQ ID NO: 351 - DNA, 10 bp, Artificial Sequence
  Synthetic Sequence
tagtcacact

SEQ ID NO: 352 - DNA, 10 bp, Artificial Sequence
  Synthetic Sequence
gtcgtgcgat

SEQ ID NO: 353 - DNA, 10 bp, Artificial Sequence
  Synthetic Sequence
agcgttgagg

SEQ ID NO: 354 - DNA, 10 bp, Artificial Sequence
  Synthetic Sequence
gtacggacta

SEQ ID NO: 355 - DNA, 10 bp, Artificial Sequence
  Synthetic Sequence
acaagattat

SEQ ID NO: 356 - DNA, 10 bp, Artificial Sequence
  Synthetic Sequence
taaattaagc

SEQ ID NO: 357 - DNA, 10 bp, Artificial Sequence
  Synthetic Sequence
atcgttagat

SEQ ID NO: 358 - DNA, 10 bp, Artificial Sequence
  Synthetic Sequence
tcgcgaccac

SEQ ID NO: 359 - DNA, 10 bp, Artificial Sequence
  Synthetic Sequence
gaaggtgtgt

SEQ ID NO: 360 - DNA, 10 bp, Artificial Sequence
  Synthetic Sequence
catttcaaat

SEQ ID NO: 361 - DNA, 10 bp, Artificial Sequence
  Synthetic Sequence
ctacgtcctc

SEQ ID NO: 362 - DNA, 10 bp, Artificial Sequence
  Synthetic Sequence
caagggcgga

SEQ ID NO: 363 - DNA, 10 bp, Artificial Sequence
  Synthetic Sequence
ctaggaacgc

SEQ ID NO: 364 - DNA, 10 bp, Artificial Sequence
  Synthetic Sequence
tttgtgggcc

SEQ ID NO: 365 - DNA, 10 bp, Artificial Sequence
  Synthetic Sequence
ttagccgcga

SEQ ID NO: 366 - DNA, 10 bp, Artificial Sequence
  Synthetic Sequence
ttatgtgttc

SEQ ID NO: 367 - DNA, 10 bp, Artificial Sequence
  Synthetic Sequence
ccatcgctga

SEQ ID NO: 368 - DNA, 10 bp, Artificial Sequence
  Synthetic Sequence
ttctgggata

SEQ ID NO: 369 - DNA, 10 bp, Artificial Sequence
  Synthetic Sequence
gcgcaacaat

SEQ ID NO: 370 - DNA, 10 bp, Artificial Sequence
  Synthetic Sequence
tgattgatag

SEQ ID NO: 371 - DNA, 10 bp, Artificial Sequence
  Synthetic Sequence
cgccacatca

SEQ ID NO: 372 - DNA, 10 bp, Artificial Sequence
  Synthetic Sequence
gggctctcat

SEQ ID NO: 373 - DNA, 10 bp, Artificial Sequence
  Synthetic Sequence
tacgaaggtt

SEQ ID NO: 374 - DNA, 10 bp, Artificial Sequence
  Synthetic Sequence
ctgtcaggca

SEQ ID NO: 375 - DNA, 10 bp, Artificial Sequence
  Synthetic Sequence
ggcaatgcca

SEQ ID NO: 376 - DNA, 10 bp, Artificial Sequence
  Synthetic Sequence
ggtccgtaac

SEQ ID NO: 377 - DNA, 10 bp, Artificial Sequence
  Synthetic Sequence
cgcccaataa

SEQ ID NO: 378 - DNA, 10 bp, Artificial Sequence
  Synthetic Sequence
cccttcccag

SEQ ID NO: 379 - DNA, 10 bp, Artificial Sequence
  Synthetic Sequence
gacttcttgt

SEQ ID NO: 380 - DNA, 10 bp, Artificial Sequence
  Synthetic Sequence
aaacgtttct

SEQ ID NO: 381 - DNA, 10 bp, Artificial Sequence
  Synthetic Sequence
cagcgctcgt

SEQ ID NO: 382 - DNA, 10 bp, Artificial Sequence
  Synthetic Sequence
cgtcacctaa

SEQ ID NO: 383 - DNA, 10 bp, Artificial Sequence
  Synthetic Sequence
tgagtcatca

SEQ ID NO: 384 - DNA, 10 bp, Artificial Sequence
  Synthetic Sequence
gcttctcaag

SEQ ID NO: 385 - DNA, 10 bp, Artificial Sequence
  Synthetic Sequence
tgcgttcagc

SEQ ID NO: 386 - DNA, 10 bp, Artificial Sequence
  Synthetic Sequence
cacaagactg

SEQ ID NO: 387 - DNA, 10 bp, Artificial Sequence
  Synthetic Sequence
ctagcctttc

SEQ ID NO: 388 - DNA, 10 bp, Artificial Sequence
  Synthetic Sequence
cggatgtccg

SEQ ID NO: 389 - DNA, 10 bp, Artificial Sequence
  Synthetic Sequence
catcttacac

SEQ ID NO: 390 - DNA, 10 bp, Artificial Sequence
  Synthetic Sequence
cctcgtacaa

SEQ ID NO: 391 - DNA, 10 bp, Artificial Sequence
  Synthetic Sequence
tttatcagag

SEQ ID NO: 392 - DNA, 10 bp, Artificial Sequence
  Synthetic Sequence
ggagcataac

SEQ ID NO: 393 - DNA, 10 bp, Artificial Sequence
  Synthetic Sequence
cagtatataa

SEQ ID NO: 394 - DNA, 10 bp, Artificial Sequence
  Synthetic Sequence
gcgtgccaac

SEQ ID NO: 395 - DNA, 10 bp, Artificial Sequence
  Synthetic Sequence
tctggcaatt

SEQ ID NO: 396 - DNA, 10 bp, Artificial Sequence
  Synthetic Sequence
gctctaagct

SEQ ID NO: 397 - DNA, 10 bp, Artificial Sequence
  Synthetic Sequence
gtgcggtaat

SEQ ID NO: 398 - DNA, 10 bp, Artificial Sequence
  Synthetic Sequence
ctggaattct

SEQ ID NO: 399 - DNA, 10 bp, Artificial Sequence
  Synthetic Sequence
acggttctgc

SEQ ID NO: 400 - DNA, 10 bp, Artificial Sequence
  Synthetic Sequence
gatatctcac

SEQ ID NO: 401 - DNA, 10 bp, Artificial Sequence
  Synthetic Sequence
tatgcttctg

SEQ ID NO: 402 - DNA, 10 bp, Artificial Sequence
  Synthetic Sequence
tctggcgttc

SEQ ID NO: 403 - DNA, 10 bp, Artificial Sequence
  Synthetic Sequence
actcaactca

SEQ ID NO: 404 - DNA, 10 bp, Artificial Sequence
  Synthetic Sequence
accgccggaa

SEQ ID NO: 405 - DNA, 10 bp, Artificial Sequence
  Synthetic Sequence
tactctcggc

SEQ ID NO: 406 - DNA, 10 bp, Artificial Sequence
  Synthetic Sequence
ctctcaatcc

SEQ ID NO: 407 - DNA, 10 bp, Artificial Sequence
  Synthetic Sequence
taccgagtca

SEQ ID NO: 408 - DNA, 10 bp, Artificial Sequence
  Synthetic Sequence
tgaatttcgg

SEQ ID NO: 409 - DNA, 10 bp, Artificial Sequence
  Synthetic Sequence
cgagcttacg

SEQ ID NO: 410 - DNA, 10 bp, Artificial Sequence
  Synthetic Sequence
gctagattct

SEQ ID NO: 411 - DNA, 10 bp, Artificial Sequence
  Synthetic Sequence
aagccgtttg

SEQ ID NO: 412 - DNA, 10 bp, Artificial Sequence
  Synthetic Sequence
agtccatcct

SEQ ID NO: 413 - DNA, 10 bp, Artificial Sequence
  Synthetic Sequence
atcctatagg

SEQ ID NO: 414 - DNA, 10 bp, Artificial Sequence
  Synthetic Sequence
cgatttcgcg

SEQ ID NO: 415 - DNA, 10 bp, Artificial Sequence
  Synthetic Sequence
gatgtcggca

SEQ ID NO: 416 - DNA, 10 bp, Artificial Sequence
  Synthetic Sequence
actgatggtc

SEQ ID NO: 417 - DNA, 10 bp, Artificial Sequence
  Synthetic Sequence
ctagccagct

SEQ ID NO: 418 - DNA, 10 bp, Artificial Sequence
  Synthetic Sequence
catccgtact

SEQ ID NO: 419 - DNA, 10 bp, Artificial Sequence
  Synthetic Sequence
aggcgtgatt

SEQ ID NO: 420 - DNA, 10 bp, Artificial Sequence
  Synthetic Sequence
aggtacacct

SEQ ID NO: 421 - DNA, 10 bp, Artificial Sequence
  Synthetic Sequence
ttaatcaggc

SEQ ID NO: 422 - DNA, 10 bp, Artificial Sequence
  Synthetic Sequence
cgtgggacca

SEQ ID NO: 423 - DNA, 10 bp, Artificial Sequence
  Synthetic Sequence
tcctctggag

SEQ ID NO: 424 - DNA, 10 bp, Artificial Sequence
  Synthetic Sequence
gaacaagcgt

SEQ ID NO: 425 - DNA, 10 bp, Artificial Sequence
  Synthetic Sequence
ctcgactcgc

SEQ ID NO: 426 - DNA, 10 bp, Artificial Sequence
  Synthetic Sequence
gatatgattg

SEQ ID NO: 427 - DNA, 10 bp, Artificial Sequence
  Synthetic Sequence
ctcaggaatt

SEQ ID NO: 428 - DNA, 10 bp, Artificial Sequence
  Synthetic Sequence
gtcttggatg

SEQ ID NO: 429 - DNA, 10 bp, Artificial Sequence
  Synthetic Sequence
ttcagtaaag

SEQ ID NO: 430 - DNA, 10 bp, Artificial Sequence
  Synthetic Sequence
ccggagaata

SEQ ID NO: 431 - DNA, 10 bp, Artificial Sequence
  Synthetic Sequence
cggcagttac

SEQ ID NO: 432 - DNA, 10 bp, Artificial Sequence
  Synthetic Sequence
agacgtccta

SEQ ID NO: 433 - DNA, 10 bp, Artificial Sequence
  Synthetic Sequence
tatacctagt

SEQ ID NO: 434 - DNA, 10 bp, Artificial Sequence
  Synthetic Sequence
gtaggctcgc

SEQ ID NO: 435 - DNA, 10 bp, Artificial Sequence
  Synthetic Sequence
gcactcagat

SEQ ID NO: 436 - DNA, 10 bp, Artificial Sequence
  Synthetic Sequence
actataactg

SEQ ID NO: 437 - DNA, 10 bp, Artificial Sequence
  Synthetic Sequence
aattctaggc

SEQ ID NO: 438 - DNA, 10 bp, Artificial Sequence
  Synthetic Sequence
tgctatcttc

SEQ ID NO: 439 - DNA, 10 bp, Artificial Sequence
  Synthetic Sequence
tcccatgatt

SEQ ID NO: 440 - DNA, 10 bp, Artificial Sequence
  Synthetic Sequence
tggaagctgg

SEQ ID NO: 441 - DNA, 10 bp, Artificial Sequence
  Synthetic Sequence
gtcggtgcga

SEQ ID NO: 442 - DNA, 10 bp, Artificial Sequence
  Synthetic Sequence
cttcattggc

SEQ ID NO: 443 - DNA, 10 bp, Artificial Sequence
  Synthetic Sequence
atttcagcct

SEQ ID NO: 444 - DNA, 10 bp, Artificial Sequence
  Synthetic Sequence
tgtgatgctt

SEQ ID NO: 445 - DNA, 10 bp, Artificial Sequence
  Synthetic Sequence
ttgggtgtag

SEQ ID NO: 446 - DNA, 10 bp, Artificial Sequence
  Synthetic Sequence
ttataaacga

SEQ ID NO: 447 - DNA, 10 bp, Artificial Sequence
  Synthetic Sequence
agtttcggag

SEQ ID NO: 448 - DNA, 10 bp, Artificial Sequence
  Synthetic Sequence
tacaatactt

SEQ ID NO: 449 - DNA, 10 bp, Artificial Sequence
  Synthetic Sequence
ctgacaaacg

SEQ ID NO: 450 - DNA, 10 bp, Artificial Sequence
  Synthetic Sequence
ccctagtccc

SEQ ID NO: 451 - DNA, 10 bp, Artificial Sequence
  Synthetic Sequence
atcaggcgca

SEQ ID NO: 452 - DNA, 10 bp, Artificial Sequence
  Synthetic Sequence
cctcactgag

SEQ ID NO: 453 - DNA, 10 bp, Artificial Sequence
  Synthetic Sequence
cgctatcaga

SEQ ID NO: 454 - DNA, 10 bp, Artificial Sequence
  Synthetic Sequence
aactttattg

SEQ ID NO: 455 - DNA, 10 bp, Artificial Sequence
  Synthetic Sequence
aaatattgct

SEQ ID NO: 456 - DNA, 10 bp, Artificial Sequence
  Synthetic Sequence
aaaccatcaa

SEQ ID NO: 457 - DNA, 10 bp, Artificial Sequence
  Synthetic Sequence
tggagggcag

SEQ ID NO: 458 - DNA, 10 bp, Artificial Sequence
  Synthetic Sequence
accaaggctc

SEQ ID NO: 459 - DNA, 10 bp, Artificial Sequence
  Synthetic Sequence
tataggcatc

SEQ ID NO: 460 - DNA, 10 bp, Artificial Sequence
  Synthetic Sequence
caagaaggta

SEQ ID NO: 461 - DNA, 10 bp, Artificial Sequence
  Synthetic Sequence
gccatggaat

SEQ ID NO: 462 - DNA, 10 bp, Artificial Sequence
  Synthetic Sequence
gcgagttcca

SEQ ID NO: 463 - DNA, 10 bp, Artificial Sequence
  Synthetic Sequence
caccagttgt

SEQ ID NO: 464 - DNA, 10 bp, Artificial Sequence
  Synthetic Sequence
tgcgtgactt

SEQ ID NO: 465 - DNA, 10 bp, Artificial Sequence
  Synthetic Sequence
acccatcgct

SEQ ID NO: 466 - DNA, 10 bp, Artificial Sequence
  Synthetic Sequence
attatttcac

SEQ ID NO: 467 - DNA, 10 bp, Artificial Sequence
  Synthetic Sequence
tttcacgcgg

SEQ ID NO: 468 - DNA, 10 bp, Artificial Sequence
  Synthetic Sequence
ccaacatcga

SEQ ID NO: 469 - DNA, 10 bp, Artificial Sequence
  Synthetic Sequence
ttatatagtc

SEQ ID NO: 470 - DNA, 10 bp, Artificial Sequence
  Synthetic Sequence
aatgctggcg

SEQ ID NO: 471 - DNA, 10 bp, Artificial Sequence
  Synthetic Sequence
actaaacaac

SEQ ID NO: 472 - DNA, 10 bp, Artificial Sequence
  Synthetic Sequence
tgatccactg

SEQ ID NO: 473 - DNA, 10 bp, Artificial Sequence
  Synthetic Sequence
ggcctgcttt

SEQ ID NO: 474 - DNA, 10 bp, Artificial Sequence
  Synthetic Sequence
gagccagtta

SEQ ID NO: 475 - DNA, 10 bp, Artificial Sequence
  Synthetic Sequence
atgtcttgag

SEQ ID NO: 476 - DNA, 10 bp, Artificial Sequence
  Synthetic Sequence
gattcccgca

SEQ ID NO: 477 - DNA, 10 bp, Artificial Sequence
  Synthetic Sequence
catacagact

SEQ ID NO: 478 - DNA, 10 bp, Artificial Sequence
  Synthetic Sequence
gcgtataccg

SEQ ID NO: 479 - DNA, 10 bp, Artificial Sequence
  Synthetic Sequence
agtaactgtc

SEQ ID NO: 480 - DNA, 10 bp, Artificial Sequence
  Synthetic Sequence
ttaacctaca

SEQ ID NO: 481 - DNA, 10 bp, Artificial Sequence
  Synthetic Sequence
tcgatcgact

SEQ ID NO: 482 - DNA, 10 bp, Artificial Sequence
  Synthetic Sequence
gacggacgag

SEQ ID NO: 483 - DNA, 10 bp, Artificial Sequence
  Synthetic Sequence
gcgcactctt

SEQ ID NO: 484 - DNA, 10 bp, Artificial Sequence
  Synthetic Sequence
gcaattacgt

SEQ ID NO: 485 - DNA, 10 bp, Artificial Sequence
  Synthetic Sequence
caataacaat

SEQ ID NO: 486 - DNA, 10 bp, Artificial Sequence
  Synthetic Sequence
ttgctaatcc

SEQ ID NO: 487 - DNA, 10 bp, Artificial Sequence
  Synthetic Sequence
tcattcacgt

SEQ ID NO: 488 - DNA, 10 bp, Artificial Sequence
  Synthetic Sequence
gagttagcga

SEQ ID NO: 489 - DNA, 10 bp, Artificial Sequence
  Synthetic Sequence
aattgatgcc

SEQ ID NO: 490 - DNA, 10 bp, Artificial Sequence
  Synthetic Sequence
tgcgcgagta

SEQ ID NO: 491 - DNA, 10 bp, Artificial Sequence
  Synthetic Sequence
ggaagtcgca

SEQ ID NO: 492 - DNA, 10 bp, Artificial Sequence
  Synthetic Sequence
tatttcccgg

SEQ ID NO: 493 - DNA, 10 bp, Artificial Sequence
  Synthetic Sequence
aaactacctg

SEQ ID NO: 494 - DNA, 10 bp, Artificial Sequence
  Synthetic Sequence
gcagtgagaa

SEQ ID NO: 495 - DNA, 10 bp, Artificial Sequence
  Synthetic Sequence
ccgataggaa

SEQ ID NO: 496 - DNA, 10 bp, Artificial Sequence
  Synthetic Sequence
gcaagcggta

SEQ ID NO: 497 - DNA, 10 bp, Artificial Sequence
  Synthetic Sequence
tcgacctctg

SEQ ID NO: 498 - DNA, 10 bp, Artificial Sequence
  Synthetic Sequence
ttgcccttca

SEQ ID NO: 499 - DNA, 10 bp, Artificial Sequence
  Synthetic Sequence
ttccctagtt

SEQ ID NO: 500 - DNA, 10 bp, Artificial Sequence
  Synthetic Sequence
cacctggttc

SEQ ID NO: 501 - DNA, 10 bp, Artificial Sequence
  Synthetic Sequence
gctgtcgcaa

SEQ ID NO: 502 - DNA, 10 bp, Artificial Sequence
  Synthetic Sequence
acgatgtgtg

SEQ ID NO: 503 - DNA, 10 bp, Artificial Sequence
  Synthetic Sequence
gagcaattgg

SEQ ID NO: 504 - DNA, 10 bp, Artificial Sequence
  Synthetic Sequence
ttaaagcctg

SEQ ID NO: 505 - DNA, 10 bp, Artificial Sequence
  Synthetic Sequence
atcaattctt

SEQ ID NO: 506 - DNA, 10 bp, Artificial Sequence
  Synthetic Sequence
acatatttag

SEQ ID NO: 507 - DNA, 10 bp, Artificial Sequence
  Synthetic Sequence
cggataccaa

SEQ ID NO: 508 - DNA, 10 bp, Artificial Sequence
  Synthetic Sequence
cttaatcgat

SEQ ID NO: 509 - DNA, 10 bp, Artificial Sequence
  Synthetic Sequence
cgtacacaca

SEQ ID NO: 510 - DNA, 10 bp, Artificial Sequence
  Synthetic Sequence
atacagaccg

SEQ ID NO: 511 - DNA, 10 bp, Artificial Sequence
  Synthetic Sequence
aattgtttgg

SEQ ID NO: 512 - DNA, 10 bp, Artificial Sequence
  Synthetic Sequence
cgctatacaa

SEQ ID NO: 513 - DNA, 10 bp, Artificial Sequence
  Synthetic Sequence
tgctcacgta

SEQ ID NO: 514 - DNA, 10 bp, Artificial Sequence
  Synthetic Sequence
agaggcgact

SEQ ID NO: 515 - DNA, 10 bp, Artificial Sequence
  Synthetic Sequence
aagggaggta

SEQ ID NO: 516 - DNA, 10 bp, Artificial Sequence
  Synthetic Sequence
ttatcatttg

SEQ ID NO: 517 - DNA, 10 bp, Artificial Sequence
  Synthetic Sequence
tgccacctac

SEQ ID NO: 518 - DNA, 10 bp, Artificial Sequence
  Synthetic Sequence
cagatcatag

SEQ ID NO: 519 - DNA, 10 bp, Artificial Sequence
  Synthetic Sequence
cgcattgcac

SEQ ID NO: 520 - DNA, 10 bp, Artificial Sequence
  Synthetic Sequence
cataacattc

SEQ ID NO: 521 - DNA, 10 bp, Artificial Sequence
  Synthetic Sequence
aacaggcatg

SEQ ID NO: 522 - DNA, 10 bp, Artificial Sequence
  Synthetic Sequence
agcaacatcg

SEQ ID NO: 523 - DNA, 10 bp, Artificial Sequence
  Synthetic Sequence
aatagtacct

SEQ ID NO: 524 - DNA, 10 bp, Artificial Sequence
  Synthetic Sequence
taaatctcag

SEQ ID NO: 525 - DNA, 10 bp, Artificial Sequence
  Synthetic Sequence
atcagggttg

SEQ ID NO: 526 - DNA, 10 bp, Artificial Sequence
  Synthetic Sequence
aactattaga

SEQ ID NO: 527 - DNA, 10 bp, Artificial Sequence
  Synthetic Sequence
tcgaagttga

SEQ ID NO: 528 - DNA, 10 bp, Artificial Sequence
  Synthetic Sequence
gaccttgtca

SEQ ID NO: 529 - DNA, 10 bp, Artificial Sequence
  Synthetic Sequence
gtcatgcagt

SEQ ID NO: 530 - DNA, 10 bp, Artificial Sequence
  Synthetic Sequence
atgttctgaa

SEQ ID NO: 531 - DNA, 10 bp, Artificial Sequence
  Synthetic Sequence
aatccgaaag

SEQ ID NO: 532 - DNA, 10 bp, Artificial Sequence
  Synthetic Sequence
tcatgtttct

SEQ ID NO: 533 - DNA, 10 bp, Artificial Sequence
  Synthetic Sequence
tctcgagcag

SEQ ID NO: 534 - DNA, 10 bp, Artificial Sequence
  Synthetic Sequence
acttgttcat

SEQ ID NO: 535 - DNA, 10 bp, Artificial Sequence
  Synthetic Sequence
tgtcgcgcct

SEQ ID NO: 536 - DNA, 10 bp, Artificial Sequence
  Synthetic Sequence
aggcttctac

SEQ ID NO: 537 - DNA, 10 bp, Artificial Sequence
  Synthetic Sequence
tatacgatcg

SEQ ID NO: 538 - DNA, 10 bp, Artificial Sequence
  Synthetic Sequence
tagtgtaacc

SEQ ID NO: 539 - DNA, 10 bp, Artificial Sequence
  Synthetic Sequence
tgaagtagcg

SEQ ID NO: 540 - DNA, 10 bp, Artificial Sequence
  Synthetic Sequence
ccaggcctat

SEQ ID NO: 541 - DNA, 10 bp, Artificial Sequence
  Synthetic Sequence
tcacaccagg

SEQ ID NO: 542 - DNA, 10 bp, Artificial Sequence
  Synthetic Sequence
aaagagaata

SEQ ID NO: 543 - DNA, 10 bp, Artificial Sequence
  Synthetic Sequence
ctttgagaag

SEQ ID NO: 544 - DNA, 10 bp, Artificial Sequence
  Synthetic Sequence
tataagtctc

SEQ ID NO: 545 - DNA, 10 bp, Artificial Sequence
  Synthetic Sequence
aggaatgccc

SEQ ID NO: 546 - DNA, 10 bp, Artificial Sequence
  Synthetic Sequence
ggtcactggg

SEQ ID NO: 547 - DNA, 10 bp, Artificial Sequence
  Synthetic Sequence
gtcctagatt

SEQ ID NO: 548 - DNA, 10 bp, Artificial Sequence
  Synthetic Sequence
taactcataa

SEQ ID NO: 549 - DNA, 10 bp, Artificial Sequence
  Synthetic Sequence
atatcgatca

SEQ ID NO: 550 - DNA, 10 bp, Artificial Sequence
  Synthetic Sequence
cgggatcgag

SEQ ID NO: 551 - DNA, 10 bp, Artificial Sequence
  Synthetic Sequence
tttgctcttc

SEQ ID NO: 552 - DNA, 10 bp, Artificial Sequence
  Synthetic Sequence
cagtccagtc

SEQ ID NO: 553 - DNA, 10 bp, Artificial Sequence
  Synthetic Sequence
cccatagaag

SEQ ID NO: 554 - DNA, 10 bp, Artificial Sequence
  Synthetic Sequence
gtatgattct

SEQ ID NO: 555 - DNA, 10 bp, Artificial Sequence
  Synthetic Sequence
atcgtccttg

SEQ ID NO: 556 - DNA, 10 bp, Artificial Sequence
  Synthetic Sequence
tctcatacat

SEQ ID NO: 557 - DNA, 10 bp, Artificial Sequence
  Synthetic Sequence
ggaacaacta

SEQ ID NO: 558 - DNA, 10 bp, Artificial Sequence
  Synthetic Sequence
ttgatgcata

SEQ ID NO: 559 - DNA, 10 bp, Artificial Sequence
  Synthetic Sequence
tattcggcct

SEQ ID NO: 560 - DNA, 10 bp, Artificial Sequence
  Synthetic Sequence
cgagcactag

SEQ ID NO: 561 - DNA, 10 bp, Artificial Sequence
  Synthetic Sequence
agttgaatga

SEQ ID NO: 562 - DNA, 10 bp, Artificial Sequence
  Synthetic Sequence
gtcaatatta

SEQ ID NO: 563 - DNA, 10 bp, Artificial Sequence
  Synthetic Sequence
ttgagccgca

SEQ ID NO: 564 - DNA, 10 bp, Artificial Sequence
  Synthetic Sequence
gcacataatc

SEQ ID NO: 565 - DNA, 10 bp, Artificial Sequence
  Synthetic Sequence
gctccaacat

SEQ ID NO: 566 - DNA, 10 bp, Artificial Sequence
  Synthetic Sequence
ttacaacgac

SEQ ID NO: 567 - DNA, 10 bp, Artificial Sequence
  Synthetic Sequence
caaggatccc

SEQ ID NO: 568 - DNA, 10 bp, Artificial Sequence
  Synthetic Sequence
acgtcccgat

SEQ ID NO: 569 - DNA, 10 bp, Artificial Sequence
  Synthetic Sequence
cttcattatg

SEQ ID NO: 570 - DNA, 10 bp, Artificial Sequence
  Synthetic Sequence
atgaccggga

SEQ ID NO: 571 - DNA, 10 bp, Artificial Sequence
  Synthetic Sequence
acaaccattg

SEQ ID NO: 572 - DNA, 10 bp, Artificial Sequence
  Synthetic Sequence
aactgttctt

SEQ ID NO: 573 - DNA, 10 bp, Artificial Sequence
  Synthetic Sequence
ggaggcttta

SEQ ID NO: 574 - DNA, 10 bp, Artificial Sequence
  Synthetic Sequence
caccatgtgc

SEQ ID NO: 575 - DNA, 10 bp, Artificial Sequence
  Synthetic Sequence
accacggtgg

SEQ ID NO: 576 - DNA, 10 bp, Artificial Sequence
  Synthetic Sequence
cccggcttct

SEQ ID NO: 577 - DNA, 10 bp, Artificial Sequence
  Synthetic Sequence
aggctaggaa

SEQ ID NO: 578 - DNA, 10 bp, Artificial Sequence
  Synthetic Sequence
tgccttggcg

SEQ ID NO: 579 - DNA, 10 bp, Artificial Sequence
  Synthetic Sequence
cagtggtgca

SEQ ID NO: 580 - DNA, 10 bp, Artificial Sequence
  Synthetic Sequence
gcagaaacga

SEQ ID NO: 581 - DNA, 10 bp, Artificial Sequence
  Synthetic Sequence
aacctgcgtg

SEQ ID NO: 582 - DNA, 10 bp, Artificial Sequence
  Synthetic Sequence
actcctatgt

SEQ ID NO: 583 - DNA, 10 bp, Artificial Sequence
  Synthetic Sequence
gcgagcttcc

SEQ ID NO: 584 - DNA, 10 bp, Artificial Sequence
  Synthetic Sequence
attacattcc

SEQ ID NO: 585 - DNA, 10 bp, Artificial Sequence
  Synthetic Sequence
gcctttctgg

SEQ ID NO: 586 - DNA, 10 bp, Artificial Sequence
  Synthetic Sequence
acacgggcca

SEQ ID NO: 587 - DNA, 10 bp, Artificial Sequence
  Synthetic Sequence
atgcggaatg

SEQ ID NO: 588 - DNA, 10 bp, Artificial Sequence
  Synthetic Sequence
caggaggatc

SEQ ID NO: 589 - DNA, 10 bp, Artificial Sequence
  Synthetic Sequence
tcacaagtgg

SEQ ID NO: 590 - DNA, 10 bp, Artificial Sequence
  Synthetic Sequence
actgcaatcc

SEQ ID NO: 591 - DNA, 10 bp, Artificial Sequence
  Synthetic Sequence
acagtccgac

SEQ ID NO: 592 - DNA, 10 bp, Artificial Sequence
  Synthetic Sequence
tgagactcgg

SEQ ID NO: 593 - DNA, 10 bp, Artificial Sequence
  Synthetic Sequence
atgaagcaaa

SEQ ID NO: 594 - DNA, 10 bp, Artificial Sequence
  Synthetic Sequence
ctctctacct

SEQ ID NO: 595 - DNA, 10 bp, Artificial Sequence
  Synthetic Sequence
accgagccat

SEQ ID NO: 596 - DNA, 10 bp, Artificial Sequence
  Synthetic Sequence
atagcttggc

SEQ ID NO: 597 - DNA, 10 bp, Artificial Sequence
  Synthetic Sequence
cttggagtgc

SEQ ID NO: 598 - DNA, 10 bp, Artificial Sequence
  Synthetic Sequence
cgataatcag

SEQ ID NO: 599 - DNA, 10 bp, Artificial Sequence
  Synthetic Sequence
acctttagta

SEQ ID NO: 600 - DNA, 10 bp, Artificial Sequence
  Synthetic Sequence
ctaccgtgga

SEQ ID NO: 601 - DNA, 10 bp, Artificial Sequence
  Synthetic Sequence
caggcaatcc

SEQ ID NO: 602 - DNA, 10 bp, Artificial Sequence
  Synthetic Sequence
gataaggtgt

SEQ ID NO: 603 - DNA, 10 bp, Artificial Sequence
  Synthetic Sequence
cgctgtgtca

SEQ ID NO: 604 - DNA, 10 bp, Artificial Sequence
  Synthetic Sequence
ctagtatact

SEQ ID NO: 605 - DNA, 10 bp, Artificial Sequence
  Synthetic Sequence
acaaagttcc

SEQ ID NO: 606 - DNA, 10 bp, Artificial Sequence
  Synthetic Sequence
gccgtcctga

SEQ ID NO: 607 - DNA, 10 bp, Artificial Sequence
  Synthetic Sequence
accgggctct

SEQ ID NO: 608 - DNA, 10 bp, Artificial Sequence
  Synthetic Sequence
ctttactgga

SEQ ID NO: 609 - DNA, 10 bp, Artificial Sequence
  Synthetic Sequence
gaaaccttaa

SEQ ID NO: 610 - DNA, 10 bp, Artificial Sequence
  Synthetic Sequence
gctccggaga

SEQ ID NO: 611 - DNA, 10 bp, Artificial Sequence
  Synthetic Sequence
cgcggaatcg

SEQ ID NO: 612 - DNA, 10 bp, Artificial Sequence
  Synthetic Sequence
ataccgcagc

SEQ ID NO: 613 - DNA, 10 bp, Artificial Sequence
  Synthetic Sequence
ccgtattatt

SEQ ID NO: 614 - DNA, 10 bp, Artificial Sequence
  Synthetic Sequence
ttaggtggca

SEQ ID NO: 615 - DNA, 10 bp, Artificial Sequence
  Synthetic Sequence
tagcgctata

SEQ ID NO: 616 - DNA, 10 bp, Artificial Sequence
  Synthetic Sequence
agatatgagt

SEQ ID NO: 617 - DNA, 10 bp, Artificial Sequence
  Synthetic Sequence
gataaaggca

SEQ ID NO: 618 - DNA, 10 bp, Artificial Sequence
  Synthetic Sequence
gaaacggttt

SEQ ID NO: 619 - DNA, 10 bp, Artificial Sequence
  Synthetic Sequence
ctcattggtg

SEQ ID NO: 620 - DNA, 10 bp, Artificial Sequence
  Synthetic Sequence
tgcatctaat

SEQ ID NO: 621 - DNA, 10 bp, Artificial Sequence
  Synthetic Sequence
ctgctacccg

SEQ ID NO: 622 - DNA, 10 bp, Artificial Sequence
  Synthetic Sequence
ccatagtcaa

SEQ ID NO: 623 - DNA, 10 bp, Artificial Sequence
  Synthetic Sequence
gacgcagtgg

SEQ ID NO: 624 - DNA, 10 bp, Artificial Sequence
  Synthetic Sequence
agcaggagga

SEQ ID NO: 625 - DNA, 10 bp, Artificial Sequence
  Synthetic Sequence
tctgtccgct

SEQ ID NO: 626 - DNA, 10 bp, Artificial Sequence
  Synthetic Sequence
gcgcgatgca

SEQ ID NO: 627 - DNA, 10 bp, Artificial Sequence
  Synthetic Sequence
aaacaactag

SEQ ID NO: 628 - DNA, 10 bp, Artificial Sequence
  Synthetic Sequence
tgtacgcggg

SEQ ID NO: 629 - DNA, 10 bp, Artificial Sequence
  Synthetic Sequence
agtgctagat

SEQ ID NO: 630 - DNA, 10 bp, Artificial Sequence
  Synthetic Sequence
gtagacgatt

SEQ ID NO: 631 - DNA, 10 bp, Artificial Sequence
  Synthetic Sequence
acaggctgga

SEQ ID NO: 632 - DNA, 10 bp, Artificial Sequence
  Synthetic Sequence
ccatggtgtc

SEQ ID NO: 633 - DNA, 10 bp, Artificial Sequence
  Synthetic Sequence
ggaggcagac

SEQ ID NO: 634 - DNA, 10 bp, Artificial Sequence
  Synthetic Sequence
acaccaaagt

SEQ ID NO: 635 - DNA, 10 bp, Artificial Sequence
  Synthetic Sequence
agtttccgtt

SEQ ID NO: 636 - DNA, 10 bp, Artificial Sequence
  Synthetic Sequence
gcttgatggc

SEQ ID NO: 637 - DNA, 10 bp, Artificial Sequence
  Synthetic Sequence
tttacactgg

SEQ ID NO: 638 - DNA, 10 bp, Artificial Sequence
  Synthetic Sequence
ttccggaaga

SEQ ID NO: 639 - DNA, 10 bp, Artificial Sequence
  Synthetic Sequence
atagtctaag

SEQ ID NO: 640 - DNA, 10 bp, Artificial Sequence
  Synthetic Sequence
gatgaccctg

SEQ ID NO: 641 - DNA, 10 bp, Artificial Sequence
  Synthetic Sequence
ttaggagcaa

SEQ ID NO: 642 - DNA, 10 bp, Artificial Sequence
  Synthetic Sequence
tatcatagtg

SEQ ID NO: 643 - DNA, 10 bp, Artificial Sequence
  Synthetic Sequence
ttggcaattg

SEQ ID NO: 644 - DNA, 10 bp, Artificial Sequence
  Synthetic Sequence
atcaactaag

SEQ ID NO: 645 - DNA, 10 bp, Artificial Sequence
  Synthetic Sequence
catatatgtc

SEQ ID NO: 646 - DNA, 10 bp, Artificial Sequence
  Synthetic Sequence
gaatcccagt

SEQ ID NO: 647 - DNA, 10 bp, Artificial Sequence
  Synthetic Sequence
gatgatcttt

SEQ ID NO: 648 - DNA, 10 bp, Artificial Sequence
  Synthetic Sequence
atccgacaaa

SEQ ID NO: 649 - DNA, 10 bp, Artificial Sequence
  Synthetic Sequence
gagagttacc

SEQ ID NO: 650 - DNA, 10 bp, Artificial Sequence
  Synthetic Sequence
ttgttggagt

SEQ ID NO: 651 - DNA, 10 bp, Artificial Sequence
  Synthetic Sequence
ggcgccagaa

SEQ ID NO: 652 - DNA, 10 bp, Artificial Sequence
  Synthetic Sequence
aggtcctgcc

SEQ ID NO: 653 - DNA, 10 bp, Artificial Sequence
  Synthetic Sequence
gtcttcggaa

SEQ ID NO: 654 - DNA, 10 bp, Artificial Sequence
  Synthetic Sequence
acagcttctc

SEQ ID NO: 655 - DNA, 10 bp, Artificial Sequence
  Synthetic Sequence
ctccagaccc

SEQ ID NO: 656 - DNA, 10 bp, Artificial Sequence
  Synthetic Sequence
atacctcgac

SEQ ID NO: 657 - DNA, 10 bp, Artificial Sequence
  Synthetic Sequence
cacttgacct

SEQ ID NO: 658 - DNA, 10 bp, Artificial Sequence
  Synthetic Sequence
agcttagggc

SEQ ID NO: 659 - DNA, 10 bp, Artificial Sequence
  Synthetic Sequence
ccgacacacc

SEQ ID NO: 660 - DNA, 10 bp, Artificial Sequence
  Synthetic Sequence
ggtttcaaga

SEQ ID NO: 661 - DNA, 10 bp, Artificial Sequence
  Synthetic Sequence
tctggtgcgc

SEQ ID NO: 662 - DNA, 10 bp, Artificial Sequence
  Synthetic Sequence
atcccagtag

SEQ ID NO: 663 - DNA, 10 bp, Artificial Sequence
  Synthetic Sequence
ttctcatggt

SEQ ID NO: 664 - DNA, 10 bp, Artificial Sequence
  Synthetic Sequence
ttcaagttct

SEQ ID NO: 665 - DNA, 10 bp, Artificial Sequence
  Synthetic Sequence
tagcccaacc

SEQ ID NO: 666 - DNA, 10 bp, Artificial Sequence
  Synthetic Sequence
cctcgaggaa

SEQ ID NO: 667 - DNA, 10 bp, Artificial Sequence
  Synthetic Sequence
aacagagtac

SEQ ID NO: 668 - DNA, 10 bp, Artificial Sequence
  Synthetic Sequence
cgttattgtg

SEQ ID NO: 669 - DNA, 10 bp, Artificial Sequence
  Synthetic Sequence
gtgacgctag

SEQ ID NO: 670 - DNA, 10 bp, Artificial Sequence
  Synthetic Sequence
ttaggctatt

SEQ ID NO: 671 - DNA, 10 bp, Artificial Sequence
  Synthetic Sequence
gtagcgcatt

SEQ ID NO: 672 - DNA, 10 bp, Artificial Sequence
  Synthetic Sequence
ctacacaggt

SEQ ID NO: 673 - DNA, 10 bp, Artificial Sequence
  Synthetic Sequence
tttcgacgag

SEQ ID NO: 674 - DNA, 10 bp, Artificial Sequence
  Synthetic Sequence
cttatacaac

SEQ ID NO: 675 - DNA, 10 bp, Artificial Sequence
  Synthetic Sequence
ttgctataaa

SEQ ID NO: 676 - DNA, 10 bp, Artificial Sequence
  Synthetic Sequence
taatatgcag

SEQ ID NO: 677 - DNA, 10 bp, Artificial Sequence
  Synthetic Sequence
acttctccta

SEQ ID NO: 678 - DNA, 10 bp, Artificial Sequence
  Synthetic Sequence
tgacacatga

SEQ ID NO: 679 - DNA, 10 bp, Artificial Sequence
  Synthetic Sequence
tgcgtccgaa

SEQ ID NO: 680 - DNA, 10 bp, Artificial Sequence
  Synthetic Sequence
cctggaaaca

SEQ ID NO: 681 - DNA, 10 bp, Artificial Sequence
  Synthetic Sequence
aaggacaccg

SEQ ID NO: 682 - DNA, 10 bp, Artificial Sequence
  Synthetic Sequence
aatcggcgat

SEQ ID NO: 683 - DNA, 10 bp, Artificial Sequence
  Synthetic Sequence
ctgaaacatt

SEQ ID NO: 684 - DNA, 10 bp, Artificial Sequence
  Synthetic Sequence
aggatctaaa

SEQ ID NO: 685 - DNA, 10 bp, Artificial Sequence
  Synthetic Sequence
gaaaggctac

SEQ ID NO: 686 - DNA, 10 bp, Artificial Sequence
  Synthetic Sequence
agtccactta

SEQ ID NO: 687 - DNA, 10 bp, Artificial Sequence
  Synthetic Sequence
tgagacctaa

SEQ ID NO: 688 - DNA, 10 bp, Artificial Sequence
  Synthetic Sequence
gataagcgag

SEQ ID NO: 689 - DNA, 10 bp, Artificial Sequence
  Synthetic Sequence
aaattatcac

SEQ ID NO: 690 - DNA, 10 bp, Artificial Sequence
  Synthetic Sequence
gggacactgg

SEQ ID NO: 691 - DNA, 10 bp, Artificial Sequence
  Synthetic Sequence
cgtgcgtaag

SEQ ID NO: 692 - DNA, 10 bp, Artificial Sequence
  Synthetic Sequence
aatttgtcgg

SEQ ID NO: 693 - DNA, 10 bp, Artificial Sequence
  Synthetic Sequence
gaagcctctt

SEQ ID NO: 694 - DNA, 10 bp, Artificial Sequence
  Synthetic Sequence
gtcgccatac

SEQ ID NO: 695 - DNA, 10 bp, Artificial Sequence
  Synthetic Sequence
gtcagtcata

SEQ ID NO: 696 - DNA, 10 bp, Artificial Sequence
  Synthetic Sequence
cggcataagc

SEQ ID NO: 697 - DNA, 10 bp, Artificial Sequence
  Synthetic Sequence
atggcgctaa

SEQ ID NO: 698 - DNA, 10 bp, Artificial Sequence
  Synthetic Sequence
tgaaatctct

SEQ ID NO: 699 - DNA, 10 bp, Artificial Sequence
  Synthetic Sequence
gagtgaatcc

SEQ ID NO: 700 - DNA, 10 bp, Artificial Sequence
  Synthetic Sequence
tgataggacg

SEQ ID NO: 701 - DNA, 10 bp, Artificial Sequence
  Synthetic Sequence
ctatactcgg

SEQ ID NO: 702 - DNA, 10 bp, Artificial Sequence
  Synthetic Sequence
cgaaggccaa

SEQ ID NO: 703 - DNA, 10 bp, Artificial Sequence
  Synthetic Sequence
gctactagat

SEQ ID NO: 704 - DNA, 10 bp, Artificial Sequence
  Synthetic Sequence
ctcgtcacaa

SEQ ID NO: 705 - DNA, 10 bp, Artificial Sequence
  Synthetic Sequence
tattgggcac

SEQ ID NO: 706 - DNA, 10 bp, Artificial Sequence
  Synthetic Sequence
tagcaataag

SEQ ID NO: 707 - DNA, 10 bp, Artificial Sequence
  Synthetic Sequence
atcgactaga

SEQ ID NO: 708 - DNA, 10 bp, Artificial Sequence
  Synthetic Sequence
tgacaagcta

SEQ ID NO: 709 - DNA, 10 bp, Artificial Sequence
  Synthetic Sequence
tcatcgtaag

SEQ ID NO: 710 - DNA, 10 bp, Artificial Sequence
  Synthetic Sequence
tcgggacgtc

SEQ ID NO: 711 - DNA, 10 bp, Artificial Sequence
  Synthetic Sequence
atctcatgca

SEQ ID NO: 712 - DNA, 10 bp, Artificial Sequence
  Synthetic Sequence
tgaatggata

SEQ ID NO: 713 - DNA, 10 bp, Artificial Sequence
  Synthetic Sequence
ggacctcaca

SEQ ID NO: 714 - DNA, 10 bp, Artificial Sequence
  Synthetic Sequence
agtgcggtct

SEQ ID NO: 715 - DNA, 10 bp, Artificial Sequence
  Synthetic Sequence
cgagatggat

SEQ ID NO: 716 - DNA, 10 bp, Artificial Sequence
  Synthetic Sequence
ataatttatg

SEQ ID NO: 717 - DNA, 10 bp, Artificial Sequence
  Synthetic Sequence
ccgcgcaagt

SEQ ID NO: 718 - DNA, 10 bp, Artificial Sequence
  Synthetic Sequence
atcggagtgg

SEQ ID NO: 719 - DNA, 10 bp, Artificial Sequence
  Synthetic Sequence
atgagttccg

SEQ ID NO: 720 - DNA, 10 bp, Artificial Sequence
  Synthetic Sequence
caacaatccg

SEQ ID NO: 721 - DNA, 10 bp, Artificial Sequence
  Synthetic Sequence
atgacctatg

SEQ ID NO: 722 - DNA, 10 bp, Artificial Sequence
  Synthetic Sequence
aacgatagag

SEQ ID NO: 723 - DNA, 10 bp, Artificial Sequence
  Synthetic Sequence
gaggaacacc

SEQ ID NO: 724 - DNA, 10 bp, Artificial Sequence
  Synthetic Sequence
ggcactaggg

SEQ ID NO: 725 - DNA, 10 bp, Artificial Sequence
  Synthetic Sequence
atcgattgaa

SEQ ID NO: 726 - DNA, 10 bp, Artificial Sequence
  Synthetic Sequence
tgtcaacaat

SEQ ID NO: 727 - DNA, 10 bp, Artificial Sequence
  Synthetic Sequence
ctagaacaca

SEQ ID NO: 728 - DNA, 10 bp, Artificial Sequence
  Synthetic Sequence
tatgttgccg

SEQ ID NO: 729 - DNA, 10 bp, Artificial Sequence
  Synthetic Sequence
attctaatca

SEQ ID NO: 730 - DNA, 10 bp, Artificial Sequence
  Synthetic Sequence
cacattagtt

SEQ ID NO: 731 - DNA, 10 bp, Artificial Sequence
  Synthetic Sequence
tctcgccagt

SEQ ID NO: 732 - DNA, 10 bp, Artificial Sequence
  Synthetic Sequence
tcgtaggttc

SEQ ID NO: 733 - DNA, 10 bp, Artificial Sequence
  Synthetic Sequence
agactgggat

SEQ ID NO: 734 - DNA, 10 bp, Artificial Sequence
  Synthetic Sequence
taatcgggtg

SEQ ID NO: 735 - DNA, 10 bp, Artificial Sequence
  Synthetic Sequence
ttggccgggt

SEQ ID NO: 736 - DNA, 10 bp, Artificial Sequence
  Synthetic Sequence
aataccatgc

SEQ ID NO: 737 - DNA, 10 bp, Artificial Sequence
  Synthetic Sequence
cagacaacta

SEQ ID NO: 738 - DNA, 10 bp, Artificial Sequence
  Synthetic Sequence
tatcgcgtcg

SEQ ID NO: 739 - DNA, 10 bp, Artificial Sequence
  Synthetic Sequence
tgtttctggt

SEQ ID NO: 740 - DNA, 10 bp, Artificial Sequence
  Synthetic Sequence
ttccggatac

SEQ ID NO: 741 - DNA, 10 bp, Artificial Sequence
  Synthetic Sequence
gactgcggta

SEQ ID NO: 742 - DNA, 10 bp, Artificial Sequence
  Synthetic Sequence
ttcgacgaaa

SEQ ID NO: 743 - DNA, 10 bp, Artificial Sequence
  Synthetic Sequence
cgaaagatac

SEQ ID NO: 744 - DNA, 10 bp, Artificial Sequence
  Synthetic Sequence
aggtttggtg

SEQ ID NO: 745 - DNA, 10 bp, Artificial Sequence
  Synthetic Sequence
cgtgtcatcc

SEQ ID NO: 746 - DNA, 10 bp, Artificial Sequence
  Synthetic Sequence
caatatatgg

SEQ ID NO: 747 - DNA, 10 bp, Artificial Sequence
  Synthetic Sequence
ggcaactgtt

SEQ ID NO: 748 - DNA, 10 bp, Artificial Sequence
  Synthetic Sequence
tgcggaccct

SEQ ID NO: 749 - DNA, 10 bp, Artificial Sequence
  Synthetic Sequence
acaaatcgat

SEQ ID NO: 750 - DNA, 10 bp, Artificial Sequence
  Synthetic Sequence
ccgatctgag

SEQ ID NO: 751 - DNA, 10 bp, Artificial Sequence
  Synthetic Sequence
ttcgtaagtc

SEQ ID NO: 752 - DNA, 10 bp, Artificial Sequence
  Synthetic Sequence
gctgtaggtt

SEQ ID NO: 753 - DNA, 10 bp, Artificial Sequence
  Synthetic Sequence
tcgatgggac

SEQ ID NO: 754 - DNA, 10 bp, Artificial Sequence
  Synthetic Sequence
agggtgaagc

SEQ ID NO: 755 - DNA, 10 bp, Artificial Sequence
  Synthetic Sequence
aacacaagtg

SEQ ID NO: 756 - DNA, 10 bp, Artificial Sequence
  Synthetic Sequence
ccgacctgtc

SEQ ID NO: 757 - DNA, 10 bp, Artificial Sequence
  Synthetic Sequence
atccaagacg

SEQ ID NO: 758 - DNA, 10 bp, Artificial Sequence
  Synthetic Sequence
tactctatat

SEQ ID NO: 759 - DNA, 10 bp, Artificial Sequence
  Synthetic Sequence
gccctccgtt

SEQ ID NO: 760 - DNA, 10 bp, Artificial Sequence
  Synthetic Sequence
tcagccgact

SEQ ID NO: 761 - DNA, 10 bp, Artificial Sequence
  Synthetic Sequence
acgtatgtgc

SEQ ID NO: 762 - DNA, 10 bp, Artificial Sequence
  Synthetic Sequence
tccgttgtta

SEQ ID NO: 763 - DNA, 10 bp, Artificial Sequence
  Synthetic Sequence
tccgtagccc

SEQ ID NO: 764 - DNA, 10 bp, Artificial Sequence
  Synthetic Sequence
cagctactat

SEQ ID NO: 765 - DNA, 10 bp, Artificial Sequence
  Synthetic Sequence
tttgatcaat

SEQ ID NO: 766 - DNA, 10 bp, Artificial Sequence
  Synthetic Sequence
aaatggtctg

SEQ ID NO: 767 - DNA, 10 bp, Artificial Sequence
  Synthetic Sequence
tgtttattga

SEQ ID NO: 768 - DNA, 10 bp, Artificial Sequence
  Synthetic Sequence
tcccggacct

SEQ ID NO: 769 - DNA, 10 bp, Artificial Sequence
  Synthetic Sequence
aagattcgtg

SEQ ID NO: 770 - DNA, 10 bp, Artificial Sequence
  Synthetic Sequence
ctacaggacc

SEQ ID NO: 771 - DNA, 10 bp, Artificial Sequence
  Synthetic Sequence
aattgaagag

SEQ ID NO: 772 - DNA, 10 bp, Artificial Sequence
  Synthetic Sequence
agctttggaa

SEQ ID NO: 773 - DNA, 10 bp, Artificial Sequence
  Synthetic Sequence
gcttagattc

SEQ ID NO: 774 - DNA, 10 bp, Artificial Sequence
  Synthetic Sequence
gcaatgcgat

SEQ ID NO: 775 - DNA, 10 bp, Artificial Sequence
  Synthetic Sequence
gtatttgacg

SEQ ID NO: 776 - DNA, 10 bp, Artificial Sequence
  Synthetic Sequence
tccctgaatt

SEQ ID NO: 777 - DNA, 10 bp, Artificial Sequence
  Synthetic Sequence
tcttctacca

SEQ ID NO: 778 - DNA, 10 bp, Artificial Sequence
  Synthetic Sequence
cacatgaaat

SEQ ID NO: 779 - DNA, 10 bp, Artificial Sequence
  Synthetic Sequence
ttgcgaggta

SEQ ID NO: 780 - DNA, 10 bp, Artificial Sequence
  Synthetic Sequence
cagatgccct

SEQ ID NO: 781 - DNA, 10 bp, Artificial Sequence
  Synthetic Sequence
tttccaaacc

SEQ ID NO: 782 - DNA, 10 bp, Artificial Sequence
  Synthetic Sequence
tcgcctaggc

SEQ ID NO: 783 - DNA, 10 bp, Artificial Sequence
  Synthetic Sequence
tgttgaaccc

SEQ ID NO: 784 - DNA, 10 bp, Artificial Sequence
  Synthetic Sequence
tcaccaactt

SEQ ID NO: 785 - DNA, 10 bp, Artificial Sequence
  Synthetic Sequence
tgcatcatac

SEQ ID NO: 786 - DNA, 10 bp, Artificial Sequence
  Synthetic Sequence
attcgaggga

SEQ ID NO: 787 - DNA, 10 bp, Artificial Sequence
  Synthetic Sequence
atgtcgtcgg

SEQ ID NO: 788 - DNA, 10 bp, Artificial Sequence
  Synthetic Sequence
ccaagccacg

SEQ ID NO: 789 - DNA, 10 bp, Artificial Sequence
  Synthetic Sequence
actacaagga

SEQ ID NO: 790 - DNA, 10 bp, Artificial Sequence
  Synthetic Sequence
gttagaataa

SEQ ID NO: 791 - DNA, 10 bp, Artificial Sequence
  Synthetic Sequence
gcattgagcc

SEQ ID NO: 792 - DNA, 10 bp, Artificial Sequence
  Synthetic Sequence
ggtttaccca

SEQ ID NO: 793 - DNA, 10 bp, Artificial Sequence
  Synthetic Sequence
accaggtata

SEQ ID NO: 794 - DNA, 10 bp, Artificial Sequence
  Synthetic Sequence
gctttgacgc

SEQ ID NO: 795 - DNA, 10 bp, Artificial Sequence
  Synthetic Sequence
ctcgcttgtg

SEQ ID NO: 796 - DNA, 10 bp, Artificial Sequence
  Synthetic Sequence
ggagggtctc

SEQ ID NO: 797 - DNA, 10 bp, Artificial Sequence
  Synthetic Sequence
ggctgactcg

SEQ ID NO: 798 - DNA, 10 bp, Artificial Sequence
  Synthetic Sequence
gaccaacatt

SEQ ID NO: 799 - DNA, 10 bp, Artificial Sequence
  Synthetic Sequence
gggatgtcac

SEQ ID NO: 800 - DNA, 10 bp, Artificial Sequence
  Synthetic Sequence
ttgtctttgg

SEQ ID NO: 801 - DNA, 10 bp, Artificial Sequence
  Synthetic Sequence
ctaagtttag

SEQ ID NO: 802 - DNA, 10 bp, Artificial Sequence
  Synthetic Sequence
ggctagttaa

SEQ ID NO: 803 - DNA, 10 bp, Artificial Sequence
  Synthetic Sequence
cttattgcga

SEQ ID NO: 804 - DNA, 10 bp, Artificial Sequence
  Synthetic Sequence
gacagatatt

SEQ ID NO: 805 - DNA, 10 bp, Artificial Sequence
  Synthetic Sequence
gtaagtgtat

SEQ ID NO: 806 - DNA, 10 bp, Artificial Sequence
  Synthetic Sequence
aaccgggagc

SEQ ID NO: 807 - DNA, 10 bp, Artificial Sequence
  Synthetic Sequence
atcggaacca

SEQ ID NO: 808 - DNA, 10 bp, Artificial Sequence
  Synthetic Sequence
tactggtccc

SEQ ID NO: 809 - DNA, 10 bp, Artificial Sequence
  Synthetic Sequence
actgcaccaa

SEQ ID NO: 810 - DNA, 10 bp, Artificial Sequence
  Synthetic Sequence
atgattaggc

SEQ ID NO: 811 - DNA, 10 bp, Artificial Sequence
  Synthetic Sequence
acctctaagc

SEQ ID NO: 812 - DNA, 10 bp, Artificial Sequence
  Synthetic Sequence
aggcgattag

SEQ ID NO: 813 - DNA, 10 bp, Artificial Sequence
  Synthetic Sequence
cgtcatgtcc

SEQ ID NO: 814 - DNA, 10 bp, Artificial Sequence
  Synthetic Sequence
tatatgaata

SEQ ID NO: 815 - DNA, 10 bp, Artificial Sequence
  Synthetic Sequence
tttggtgtcc

SEQ ID NO: 816 - DNA, 10 bp, Artificial Sequence
  Synthetic Sequence
cctgcctagg

SEQ ID NO: 817 - DNA, 10 bp, Artificial Sequence
  Synthetic Sequence
acggagtcaa

SEQ ID NO: 818 - DNA, 10 bp, Artificial Sequence
  Synthetic Sequence
acagtacgct

SEQ ID NO: 819 - DNA, 10 bp, Artificial Sequence
  Synthetic Sequence
gcctgataag

SEQ ID NO: 820 - DNA, 10 bp, Artificial Sequence
  Synthetic Sequence
agaagagcac

SEQ ID NO: 821 - DNA, 10 bp, Artificial Sequence
  Synthetic Sequence
tcgttcgtga

SEQ ID NO: 822 - DNA, 10 bp, Artificial Sequence
  Synthetic Sequence
ccaccaacac

SEQ ID NO: 823 - DNA, 10 bp, Artificial Sequence
  Synthetic Sequence
ttgatggtga

SEQ ID NO: 824 - DNA, 10 bp, Artificial Sequence
  Synthetic Sequence
ctcaggtaca

SEQ ID NO: 825 - DNA, 10 bp, Artificial Sequence
  Synthetic Sequence
tttccgccca

SEQ ID NO: 826 - DNA, 10 bp, Artificial Sequence
  Synthetic Sequence
tgaccgagag

SEQ ID NO: 827 - DNA, 10 bp, Artificial Sequence
  Synthetic Sequence
gcggtgtaac

SEQ ID NO: 828 - DNA, 10 bp, Artificial Sequence
  Synthetic Sequence
gtgacccagg

SEQ ID NO: 829 - DNA, 10 bp, Artificial Sequence
  Synthetic Sequence
acctagtaac

SEQ ID NO: 830 - DNA, 10 bp, Artificial Sequence
  Synthetic Sequence
tgggcagact

SEQ ID NO: 831 - DNA, 10 bp, Artificial Sequence
  Synthetic Sequence
tggtggcata

SEQ ID NO: 832 - DNA, 10 bp, Artificial Sequence
  Synthetic Sequence
ttaggaagtt

SEQ ID NO: 833 - DNA, 10 bp, Artificial Sequence
  Synthetic Sequence
tgtacgttca

SEQ ID NO: 834 - DNA, 10 bp, Artificial Sequence
  Synthetic Sequence
gcagatggtt

SEQ ID NO: 835 - DNA, 10 bp, Artificial Sequence
  Synthetic Sequence
aatctgatct

SEQ ID NO: 836 - DNA, 10 bp, Artificial Sequence
  Synthetic Sequence
aagccaaaga

SEQ ID NO: 837 - DNA, 10 bp, Artificial Sequence
  Synthetic Sequence
tcttgggtta

SEQ ID NO: 838 - DNA, 10 bp, Artificial Sequence
  Synthetic Sequence
tcctgcataa

SEQ ID NO: 839 - DNA, 10 bp, Artificial Sequence
  Synthetic Sequence
tttcttgcct

SEQ ID NO: 840 - DNA, 10 bp, Artificial Sequence
  Synthetic Sequence
ttacgttcag

SEQ ID NO: 841 - DNA, 10 bp, Artificial Sequence
  Synthetic Sequence
acaagtgacg

SEQ ID NO: 842 - DNA, 10 bp, Artificial Sequence
  Synthetic Sequence
aatgacgaat

SEQ ID NO: 843 - DNA, 10 bp, Artificial Sequence
  Synthetic Sequence
ttcgcacccg

SEQ ID NO: 844 - DNA, 10 bp, Artificial Sequence
  Synthetic Sequence
agaatatctg

SEQ ID NO: 845 - DNA, 10 bp, Artificial Sequence
  Synthetic Sequence
agatcactgt

SEQ ID NO: 846 - DNA, 10 bp, Artificial Sequence
  Synthetic Sequence
acttgcaaga

SEQ ID NO: 847 - DNA, 10 bp, Artificial Sequence
  Synthetic Sequence
ctcattccgt

SEQ ID NO: 848 - DNA, 10 bp, Artificial Sequence
  Synthetic Sequence
ggttgcggga

SEQ ID NO: 849 - DNA, 10 bp, Artificial Sequence
  Synthetic Sequence
aatagaaatg

SEQ ID NO: 850 - DNA, 10 bp, Artificial Sequence
  Synthetic Sequence
aaaggcagtg

SEQ ID NO: 851 - DNA, 10 bp, Artificial Sequence
  Synthetic Sequence
acctcatatt

SEQ ID NO: 852 - DNA, 10 bp, Artificial Sequence
  Synthetic Sequence
caaatttaga

SEQ ID NO: 853 - DNA, 10 bp, Artificial Sequence
  Synthetic Sequence
tatgcgggat

SEQ ID NO: 854 - DNA, 10 bp, Artificial Sequence
  Synthetic Sequence
gtacccgacc

SEQ ID NO: 855 - DNA, 10 bp, Artificial Sequence
  Synthetic Sequence
gcttcgcgga

SEQ ID NO: 856 - DNA, 10 bp, Artificial Sequence
  Synthetic Sequence
tatgtaggta

SEQ ID NO: 857 - DNA, 10 bp, Artificial Sequence
  Synthetic Sequence
cttcctcagc

SEQ ID NO: 858 - DNA, 10 bp, Artificial Sequence
  Synthetic Sequence
gtccgtacgc

SEQ ID NO: 859 - DNA, 10 bp, Artificial Sequence
  Synthetic Sequence
cacaatcgcc

SEQ ID NO: 860 - DNA, 10 bp, Artificial Sequence
  Synthetic Sequence
acccacagcc

SEQ ID NO: 861 - DNA, 10 bp, Artificial Sequence
  Synthetic Sequence
ttccataatg

SEQ ID NO: 862 - DNA, 10 bp, Artificial Sequence
  Synthetic Sequence
ggaatgagcg

SEQ ID NO: 863 - DNA, 10 bp, Artificial Sequence
  Synthetic Sequence
aagtaccgtg

SEQ ID NO: 864 - DNA, 10 bp, Artificial Sequence
  Synthetic Sequence
tagggtcgac

SEQ ID NO: 865 - DNA, 10 bp, Artificial Sequence
  Synthetic Sequence
ttcacggcct

SEQ ID NO: 866 - DNA, 10 bp, Artificial Sequence
  Synthetic Sequence
caccgtctca

SEQ ID NO: 867 - DNA, 10 bp, Artificial Sequence
  Synthetic Sequence
gacagggagg

SEQ ID NO: 868 - DNA, 10 bp, Artificial Sequence
  Synthetic Sequence
taccgatcgc

SEQ ID NO: 869 - DNA, 10 bp, Artificial Sequence
  Synthetic Sequence
atgcaagctg

SEQ ID NO: 870 - DNA, 10 bp, Artificial Sequence
  Synthetic Sequence
cgctgacttc

SEQ ID NO: 871 - DNA, 10 bp, Artificial Sequence
  Synthetic Sequence
ctgatccaaa

SEQ ID NO: 872 - DNA, 10 bp, Artificial Sequence
  Synthetic Sequence
aggctcgtgc

SEQ ID NO: 873 - DNA, 10 bp, Artificial Sequence
  Synthetic Sequence
tcattgcact

SEQ ID NO: 874 - DNA, 10 bp, Artificial Sequence
  Synthetic Sequence
tcagaagtac

SEQ ID NO: 875 - DNA, 10 bp, Artificial Sequence
  Synthetic Sequence
attgcacatt

SEQ ID NO: 876 - DNA, 10 bp, Artificial Sequence
  Synthetic Sequence
ggacccgagt

SEQ ID NO: 877 - DNA, 10 bp, Artificial Sequence
  Synthetic Sequence
agtaagggaa

SEQ ID NO: 878 - DNA, 10 bp, Artificial Sequence
  Synthetic Sequence
tagcccaggt

SEQ ID NO: 879 - DNA, 10 bp, Artificial Sequence
  Synthetic Sequence
caaggatagt

SEQ ID NO: 880 - DNA, 10 bp, Artificial Sequence
  Synthetic Sequence
agacagggtc

SEQ ID NO: 881 - DNA, 10 bp, Artificial Sequence
  Synthetic Sequence
tttgagctga

SEQ ID NO: 882 - DNA, 10 bp, Artificial Sequence
  Synthetic Sequence
ccgcccgtaa

SEQ ID NO: 883 - DNA, 10 bp, Artificial Sequence
  Synthetic Sequence
gtatcgtccc

SEQ ID NO: 884 - DNA, 10 bp, Artificial Sequence
  Synthetic Sequence
ccataacgtt

SEQ ID NO: 885 - DNA, 10 bp, Artificial Sequence
  Synthetic Sequence
tgacgtctca

SEQ ID NO: 886 - DNA, 10 bp, Artificial Sequence
  Synthetic Sequence
ctctcctcca

SEQ ID NO: 887 - DNA, 10 bp, Artificial Sequence
  Synthetic Sequence
ggtattaggc

SEQ ID NO: 888 - DNA, 10 bp, Artificial Sequence
  Synthetic Sequence
atagttaggg

SEQ ID NO: 889 - DNA, 10 bp, Artificial Sequence
  Synthetic Sequence
ggtaatgtga

SEQ ID NO: 890 - DNA, 10 bp, Artificial Sequence
  Synthetic Sequence
caccctgcag

SEQ ID NO: 891 - DNA, 10 bp, Artificial Sequence
  Synthetic Sequence
cattgtacgg

SEQ ID NO: 892 - DNA, 10 bp, Artificial Sequence
  Synthetic Sequence
atgtgcgccg

SEQ ID NO: 893 - DNA, 10 bp, Artificial Sequence
  Synthetic Sequence
tcaatagcct

SEQ ID NO: 894 - DNA, 10 bp, Artificial Sequence
  Synthetic Sequence
tatagaattc

SEQ ID NO: 895 - DNA, 10 bp, Artificial Sequence
  Synthetic Sequence
cggttacact

SEQ ID NO: 896 - DNA, 10 bp, Artificial Sequence
  Synthetic Sequence
cgaagcagat

SEQ ID NO: 897 - DNA, 10 bp, Artificial Sequence
  Synthetic Sequence
tagtagtata

SEQ ID NO: 898 - DNA, 10 bp, Artificial Sequence
  Synthetic Sequence
atacaagtaa

SEQ ID NO: 899 - DNA, 10 bp, Artificial Sequence
  Synthetic Sequence
cgacttatca

SEQ ID NO: 900 - DNA, 10 bp, Artificial Sequence
  Synthetic Sequence
aggcctaata

SEQ ID NO: 901 - DNA, 10 bp, Artificial Sequence
  Synthetic Sequence
tgcggtactg

SEQ ID NO: 902 - DNA, 10 bp, Artificial Sequence
  Synthetic Sequence
taggacctat

SEQ ID NO: 903 - DNA, 10 bp, Artificial Sequence
  Synthetic Sequence
ggtcaaggtc

SEQ ID NO: 904 - DNA, 10 bp, Artificial Sequence
  Synthetic Sequence
caagcaggcc

SEQ ID NO: 905 - DNA, 10 bp, Artificial Sequence
  Synthetic Sequence
ttattactat

SEQ ID NO: 906 - DNA, 10 bp, Artificial Sequence
  Synthetic Sequence
tcaaatttgg

SEQ ID NO: 907 - DNA, 10 bp, Artificial Sequence
  Synthetic Sequence
tggtactacc

SEQ ID NO: 908 - DNA, 10 bp, Artificial Sequence
  Synthetic Sequence
ttggtggtac

SEQ ID NO: 909 - DNA, 10 bp, Artificial Sequence
  Synthetic Sequence
tcctataccc

SEQ ID NO: 910 - DNA, 10 bp, Artificial Sequence
  Synthetic Sequence
gacaattgtc

SEQ ID NO: 911 - DNA, 10 bp, Artificial Sequence
  Synthetic Sequence
aggtaatgct

SEQ ID NO: 912 - DNA, 10 bp, Artificial Sequence
  Synthetic Sequence
gaactgatcg

SEQ ID NO: 913 - DNA, 10 bp, Artificial Sequence
  Synthetic Sequence
tctcggtatt

SEQ ID NO: 914 - DNA, 10 bp, Artificial Sequence
  Synthetic Sequence
tggacttgca

SEQ ID NO: 915 - DNA, 10 bp, Artificial Sequence
  Synthetic Sequence
taacgaatat

SEQ ID NO: 916 - DNA, 10 bp, Artificial Sequence
  Synthetic Sequence
aggagcatgc

SEQ ID NO: 917 - DNA, 10 bp, Artificial Sequence
  Synthetic Sequence
ctggagaagc

SEQ ID NO: 918 - DNA, 10 bp, Artificial Sequence
  Synthetic Sequence
tcacattaat

SEQ ID NO: 919 - DNA, 10 bp, Artificial Sequence
  Synthetic Sequence
tgttggctct

SEQ ID NO: 920 - DNA, 10 bp, Artificial Sequence
  Synthetic Sequence
cagcctagag

SEQ ID NO: 921 - DNA, 10 bp, Artificial Sequence
  Synthetic Sequence
ctcttgttac

SEQ ID NO: 922 - DNA, 10 bp, Artificial Sequence
  Synthetic Sequence
acatgaacgc

SEQ ID NO: 923 - DNA, 10 bp, Artificial Sequence
  Synthetic Sequence
gaactctggt

SEQ ID NO: 924 - DNA, 10 bp, Artificial Sequence
  Synthetic Sequence
aagcttatgg

SEQ ID NO: 925 - DNA, 10 bp, Artificial Sequence
  Synthetic Sequence
taccggaggt

SEQ ID NO: 926 - DNA, 10 bp, Artificial Sequence
  Synthetic Sequence
gacctgcaag

SEQ ID NO: 927 - DNA, 10 bp, Artificial Sequence
  Synthetic Sequence
ttcttatatt

SEQ ID NO: 928 - DNA, 10 bp, Artificial Sequence
  Synthetic Sequence
cattggaatt

SEQ ID NO: 929 - DNA, 10 bp, Artificial Sequence
  Synthetic Sequence
atgctaagac

SEQ ID NO: 930 - DNA, 10 bp, Artificial Sequence
  Synthetic Sequence
taggaatgtg

SEQ ID NO: 931 - DNA, 10 bp, Artificial Sequence
  Synthetic Sequence
gtatattcac

SEQ ID NO: 932 - DNA, 10 bp, Artificial Sequence
  Synthetic Sequence
gttccacttg

SEQ ID NO: 933 - DNA, 10 bp, Artificial Sequence
  Synthetic Sequence
ctccctgatc

SEQ ID NO: 934 - DNA, 10 bp, Artificial Sequence
  Synthetic Sequence
cccggattga

SEQ ID NO: 935 - DNA, 10 bp, Artificial Sequence
  Synthetic Sequence
cactagggtc

SEQ ID NO: 936 - DNA, 10 bp, Artificial Sequence
  Synthetic Sequence
ctgggctagt

SEQ ID NO: 937 - DNA, 10 bp, Artificial Sequence
  Synthetic Sequence
gaggtgtatt

SEQ ID NO: 938 - DNA, 10 bp, Artificial Sequence
  Synthetic Sequence
gcataatgaa

SEQ ID NO: 939 - DNA, 10 bp, Artificial Sequence
  Synthetic Sequence
taacgtaagg

SEQ ID NO: 940 - DNA, 10 bp, Artificial Sequence
  Synthetic Sequence
actctattct

SEQ ID NO: 941 - DNA, 10 bp, Artificial Sequence
  Synthetic Sequence
gtcattatat

SEQ ID NO: 942 - DNA, 10 bp, Artificial Sequence
  Synthetic Sequence
tcagtcgtat

SEQ ID NO: 943 - DNA, 10 bp, Artificial Sequence
  Synthetic Sequence
tccatggaga

SEQ ID NO: 944 - DNA, 10 bp, Artificial Sequence
  Synthetic Sequence
tctacccaga

SEQ ID NO: 945 - DNA, 10 bp, Artificial Sequence
  Synthetic Sequence
cataagatgg

SEQ ID NO: 946 - DNA, 10 bp, Artificial Sequence
  Synthetic Sequence
tgatcgtaga

SEQ ID NO: 947 - DNA, 10 bp, Artificial Sequence
  Synthetic Sequence
cagagtgaca

SEQ ID NO: 948 - DNA, 10 bp, Artificial Sequence
  Synthetic Sequence
ctatcgggaa

SEQ ID NO: 949 - DNA, 10 bp, Artificial Sequence
  Synthetic Sequence
aggcttcccg

SEQ ID NO: 950 - DNA, 10 bp, Artificial Sequence
  Synthetic Sequence
acagctgtgg

SEQ ID NO: 951 - DNA, 10 bp, Artificial Sequence
  Synthetic Sequence
gactcatagc

SEQ ID NO: 952 - DNA, 10 bp, Artificial Sequence
  Synthetic Sequence
gtcgcgtagg

SEQ ID NO: 953 - DNA, 10 bp, Artificial Sequence
  Synthetic Sequence
aaggagctgc

SEQ ID NO: 954 - DNA, 10 bp, Artificial Sequence
  Synthetic Sequence
ttgtacttat

SEQ ID NO: 955 - DNA, 10 bp, Artificial Sequence
  Synthetic Sequence
ttccacagta

SEQ ID NO: 956 - DNA, 10 bp, Artificial Sequence
  Synthetic Sequence
tgtactggtt

SEQ ID NO: 957 - DNA, 10 bp, Artificial Sequence
  Synthetic Sequence
cggtgttctc

SEQ ID NO: 958 - DNA, 10 bp, Artificial Sequence
  Synthetic Sequence
tctcgaatgg

SEQ ID NO: 959 - DNA, 10 bp, Artificial Sequence
  Synthetic Sequence
cgtttagacc

SEQ ID NO: 960 - DNA, 10 bp, Artificial Sequence
  Synthetic Sequence
gtggttcgta

SEQ ID NO: 961 - DNA, 10 bp, Artificial Sequence
  Synthetic Sequence
tatgtagtag

SEQ ID NO: 962 - DNA, 10 bp, Artificial Sequence
  Synthetic Sequence
ctcagtatcg

SEQ ID NO: 963 - DNA, 10 bp, Artificial Sequence
  Synthetic Sequence
ggctcgtctc

SEQ ID NO: 964 - DNA, 10 bp, Artificial Sequence
  Synthetic Sequence
tcatcaccgc

SEQ ID NO: 965 - DNA, 10 bp, Artificial Sequence
  Synthetic Sequence
tgggtgtcag

SEQ ID NO: 966 - DNA, 10 bp, Artificial Sequence
  Synthetic Sequence
atggccgctt

SEQ ID NO: 967 - DNA, 10 bp, Artificial Sequence
  Synthetic Sequence
cggtattgat

SEQ ID NO: 968 - DNA, 10 bp, Artificial Sequence
  Synthetic Sequence
catcatgaaa

SEQ ID NO: 969 - DNA, 10 bp, Artificial Sequence
  Synthetic Sequence
gcgactcctc

SEQ ID NO: 970 - DNA, 10 bp, Artificial Sequence
  Synthetic Sequence
acgccgggtt

SEQ ID NO: 971 - DNA, 10 bp, Artificial Sequence
  Synthetic Sequence
cgacaataac

SEQ ID NO: 972 - DNA, 10 bp, Artificial Sequence
  Synthetic Sequence
gcagcagatg

SEQ ID NO: 973 - DNA, 10 bp, Artificial Sequence
  Synthetic Sequence
attacggcac

SEQ ID NO: 974 - DNA, 10 bp, Artificial Sequence
  Synthetic Sequence
actctctcca

SEQ ID NO: 975 - DNA, 10 bp, Artificial Sequence
  Synthetic Sequence
accatccctc

SEQ ID NO: 976 - DNA, 10 bp, Artificial Sequence
  Synthetic Sequence
aggatgatga

SEQ ID NO: 977 - DNA, 10 bp, Artificial Sequence
  Synthetic Sequence
cgagaacatc

SEQ ID NO: 978 - DNA, 10 bp, Artificial Sequence
  Synthetic Sequence
gaggagtcca

SEQ ID NO: 979 - DNA, 10 bp, Artificial Sequence
  Synthetic Sequence
ttgaaacttc

SEQ ID NO: 980 - DNA, 10 bp, Artificial Sequence
  Synthetic Sequence
tgtcaatctt

SEQ ID NO: 981 - DNA, 10 bp, Artificial Sequence
  Synthetic Sequence
cagcttatct

SEQ ID NO: 982 - DNA, 10 bp, Artificial Sequence
  Synthetic Sequence
ttgtattcct

SEQ ID NO: 983 - DNA, 10 bp, Artificial Sequence
  Synthetic Sequence
gcatgacggg

SEQ ID NO: 984 - DNA, 10 bp, Artificial Sequence
  Synthetic Sequence
tctaggagtc

SEQ ID NO: 985 - DNA, 10 bp, Artificial Sequence
  Synthetic Sequence
actgcccgag

SEQ ID NO: 986 - DNA, 10 bp, Artificial Sequence
  Synthetic Sequence
aatagtcaat

SEQ ID NO: 987 - DNA, 10 bp, Artificial Sequence
  Synthetic Sequence
cgggacaggt

SEQ ID NO: 988 - DNA, 10 bp, Artificial Sequence
  Synthetic Sequence
cacagcgttc

SEQ ID NO: 989 - DNA, 10 bp, Artificial Sequence
  Synthetic Sequence
tccctcaaag

SEQ ID NO: 990 - DNA, 10 bp, Artificial Sequence
  Synthetic Sequence
gctttccctg

SEQ ID NO: 991 - DNA, 10 bp, Artificial Sequence
  Synthetic Sequence
gccacaaatt

SEQ ID NO: 992 - DNA, 10 bp, Artificial Sequence
  Synthetic Sequence
gcggcttcgt

SEQ ID NO: 993 - DNA, 10 bp, Artificial Sequence
  Synthetic Sequence
gaagccagga

SEQ ID NO: 994 - DNA, 10 bp, Artificial Sequence
  Synthetic Sequence
tggaacgtgc

SEQ ID NO: 995 - DNA, 10 bp, Artificial Sequence
  Synthetic Sequence
atctgtcccg

SEQ ID NO: 996 - DNA, 10 bp, Artificial Sequence
  Synthetic Sequence
ccttctcgac

SEQ ID NO: 997 - DNA, 10 bp, Artificial Sequence
  Synthetic Sequence
ccgtatggtg

SEQ ID NO: 998 - DNA, 10 bp, Artificial Sequence
  Synthetic Sequence
cttgggttac

SEQ ID NO: 999 - DNA, 10 bp, Artificial Sequence
  Synthetic Sequence
cctgtacgga

SEQ ID NO: 1000 - DNA, 10 bp, Artificial Sequence
  Synthetic Sequence
tgcgacggtc

SEQ ID NO: 1001 - DNA, 10 bp, Artificial Sequence
  Synthetic Sequence
agacatgcga

SEQ ID NO: 1002 - DNA, 10 bp, Artificial Sequence
  Synthetic Sequence
tgcgcctcta

SEQ ID NO: 1003 - DNA, 10 bp, Artificial Sequence
  Synthetic Sequence
ttcaacgccg

SEQ ID NO: 1004 - DNA, 10 bp, Artificial Sequence
  Synthetic Sequence
atgctatact

SEQ ID NO: 1005 - DNA, 10 bp, Artificial Sequence
  Synthetic Sequence
aatagcctac

SEQ ID NO: 1006 - DNA, 10 bp, Artificial Sequence
  Synthetic Sequence
tgtcctgacc

SEQ ID NO: 1007 - DNA, 10 bp, Artificial Sequence
  Synthetic Sequence
tcttggcctg

SEQ ID NO: 1008 - DNA, 10 bp, Artificial Sequence
  Synthetic Sequence
agaccgtggt

SEQ ID NO: 1009 - DNA, 10 bp, Artificial Sequence
  Synthetic Sequence
agtagtcacg

SEQ ID NO: 1010 - DNA, 10 bp, Artificial Sequence
  Synthetic Sequence
gacggtagtg

SEQ ID NO: 1011 - DNA, 10 bp, Artificial Sequence
  Synthetic Sequence
cgtctgccta

SEQ ID NO: 1012 - DNA, 10 bp, Artificial Sequence
  Synthetic Sequence
tggattcggt

SEQ ID NO: 1013 - DNA, 10 bp, Artificial Sequence
  Synthetic Sequence
ctttcgtgtt

SEQ ID NO: 1014 - DNA, 10 bp, Artificial Sequence
  Synthetic Sequence
cgtaccgaaa

SEQ ID NO: 1015 - DNA, 10 bp, Artificial Sequence
  Synthetic Sequence
gtagctaacg

SEQ ID NO: 1016 - DNA, 10 bp, Artificial Sequence
  Synthetic Sequence
gtatagtgtg

SEQ ID NO: 1017 - DNA, 10 bp, Artificial Sequence
  Synthetic Sequence
tgtggtttca

SEQ ID NO: 1018 - DNA, 10 bp, Artificial Sequence
  Synthetic Sequence
tacttcgagg

SEQ ID NO: 1019 - DNA, 10 bp, Artificial Sequence
  Synthetic Sequence
ttgagcgagc

SEQ ID NO: 1020 - DNA, 10 bp, Artificial Sequence
  Synthetic Sequence
cccatatctc

SEQ ID NO: 1021 - DNA, 10 bp, Artificial Sequence
  Synthetic Sequence
aatcgcggcc

SEQ ID NO: 1022 - DNA, 10 bp, Artificial Sequence
  Synthetic Sequence
acgaaggagc

SEQ ID NO: 1023 - DNA, 10 bp, Artificial Sequence
  Synthetic Sequence
tgggaccgtg

SEQ ID NO: 1024 - DNA, 10 bp, Artificial Sequence
  Synthetic Sequence
cacgtttcgc

SEQ ID NO: 1025 - DNA, 10 bp, Artificial Sequence
  Synthetic Sequence
tatcgagagt

SEQ ID NO: 1026 - DNA, 10 bp, Artificial Sequence
  Synthetic Sequence
agtcgagcaa

SEQ ID NO: 1027 - DNA, 10 bp, Artificial Sequence
  Synthetic Sequence
tctcaaagta

SEQ ID NO: 1028 - DNA, 10 bp, Artificial Sequence
  Synthetic Sequence
aagtaaggga

SEQ ID NO: 1029 - DNA, 10 bp, Artificial Sequence
  Synthetic Sequence
cgttaggcct

SEQ ID NO: 1030 - DNA, 10 bp, Artificial Sequence
  Synthetic Sequence
tacaaccgag

SEQ ID NO: 1031 - DNA, 10 bp, Artificial Sequence
  Synthetic Sequence
gtgtcctaga

SEQ ID NO: 1032 - DNA, 10 bp, Artificial Sequence
  Synthetic Sequence
gagggaatat

SEQ ID NO: 1033 - DNA, 10 bp, Artificial Sequence
  Synthetic Sequence
tattctatgg

SEQ ID NO: 1034 - DNA, 10 bp, Artificial Sequence
  Synthetic Sequence
acggaagtaa

SEQ ID NO: 1035 - DNA, 10 bp, Artificial Sequence
  Synthetic Sequence
gagggcgcaa

SEQ ID NO: 1036 - DNA, 10 bp, Artificial Sequence
  Synthetic Sequence
gaaacttctg

SEQ ID NO: 1037 - DNA, 10 bp, Artificial Sequence
  Synthetic Sequence
caattagctt

SEQ ID NO: 1038 - DNA, 10 bp, Artificial Sequence
  Synthetic Sequence
cagggtcata

SEQ ID NO: 1039 - DNA, 10 bp, Artificial Sequence
  Synthetic Sequence
gctgagacca

SEQ ID NO: 1040 - DNA, 10 bp, Artificial Sequence
  Synthetic Sequence
taaccggttc

SEQ ID NO: 1041 - DNA, 10 bp, Artificial Sequence
  Synthetic Sequence
tcctactatc

SEQ ID NO: 1042 - DNA, 10 bp, Artificial Sequence
  Synthetic Sequence
cgcacaccag

SEQ ID NO: 1043 - DNA, 10 bp, Artificial Sequence
  Synthetic Sequence
cttgaaggtc

SEQ ID NO: 1044 - DNA, 10 bp, Artificial Sequence
  Synthetic Sequence
aacgtcagga

SEQ ID NO: 1045 - DNA, 10 bp, Artificial Sequence
  Synthetic Sequence
cgtgaatatg

SEQ ID NO: 1046 - DNA, 10 bp, Artificial Sequence
  Synthetic Sequence
gtgtatttag

SEQ ID NO: 1047 - DNA, 10 bp, Artificial Sequence
  Synthetic Sequence
tgctaacaaa

SEQ ID NO: 1048 - DNA, 10 bp, Artificial Sequence
  Synthetic Sequence
atttggctgt

SEQ ID NO: 1049 - DNA, 10 bp, Artificial Sequence
  Synthetic Sequence
ccagtacaaa

SEQ ID NO: 1050 - DNA, 10 bp, Artificial Sequence
  Synthetic Sequence
cgaagtgaac

SEQ ID NO: 1051 - DNA, 10 bp, Artificial Sequence
  Synthetic Sequence
ctccgcttcg

SEQ ID NO: 1052 - DNA, 10 bp, Artificial Sequence
  Synthetic Sequence
accgtttcct

SEQ ID NO: 1053 - DNA, 10 bp, Artificial Sequence
  Synthetic Sequence
gatgtcatac

SEQ ID NO: 1054 - DNA, 10 bp, Artificial Sequence
  Synthetic Sequence
tcgctctcgg

SEQ ID NO: 1055 - DNA, 10 bp, Artificial Sequence
  Synthetic Sequence
cgcttgtacg

SEQ ID NO: 1056 - DNA, 10 bp, Artificial Sequence
  Synthetic Sequence
gaacagatgc

SEQ ID NO: 1057 - DNA, 10 bp, Artificial Sequence
  Synthetic Sequence
ctttacgctt

SEQ ID NO: 1058 - DNA, 10 bp, Artificial Sequence
  Synthetic Sequence
atatccaggt

SEQ ID NO: 1059 - DNA, 10 bp, Artificial Sequence
  Synthetic Sequence
tcagcatagt

SEQ ID NO: 1060 - DNA, 10 bp, Artificial Sequence
  Synthetic Sequence
cgtatgtatt

SEQ ID NO: 1061 - DNA, 10 bp, Artificial Sequence
  Synthetic Sequence
gggcttagcg

SEQ ID NO: 1062 - DNA, 10 bp, Artificial Sequence
  Synthetic Sequence
aatgaattta

SEQ ID NO: 1063 - DNA, 10 bp, Artificial Sequence
  Synthetic Sequence
gttaatgccc

SEQ ID NO: 1064 - DNA, 10 bp, Artificial Sequence
  Synthetic Sequence
agttatgccg

SEQ ID NO: 1065 - DNA, 10 bp, Artificial Sequence
  Synthetic Sequence
atctttcggg

SEQ ID NO: 1066 - DNA, 10 bp, Artificial Sequence
  Synthetic Sequence
attgcttgtt

SEQ ID NO: 1067 - DNA, 10 bp, Artificial Sequence
  Synthetic Sequence
gtacttacct

SEQ ID NO: 1068 - DNA, 10 bp, Artificial Sequence
  Synthetic Sequence
gtgtaagtgg

SEQ ID NO: 1069 - DNA, 10 bp, Artificial Sequence
  Synthetic Sequence
tcattataaa

SEQ ID NO: 1070 - DNA, 10 bp, Artificial Sequence
  Synthetic Sequence
gaacactagg

SEQ ID NO: 1071 - DNA, 10 bp, Artificial Sequence
  Synthetic Sequence
taggattgaa

SEQ ID NO: 1072 - DNA, 10 bp, Artificial Sequence
  Synthetic Sequence
gaacgtgaat

SEQ ID NO: 1073 - DNA, 10 bp, Artificial Sequence
  Synthetic Sequence
cgtggtcaag

SEQ ID NO: 1074 - DNA, 10 bp, Artificial Sequence
  Synthetic Sequence
tcccagggca

SEQ ID NO: 1075 - DNA, 10 bp, Artificial Sequence
  Synthetic Sequence
cctaacaacc

SEQ ID NO: 1076 - DNA, 10 bp, Artificial Sequence
  Synthetic Sequence
agtggctcta

SEQ ID NO: 1077 - DNA, 10 bp, Artificial Sequence
  Synthetic Sequence
ggatgaggag

SEQ ID NO: 1078 - DNA, 10 bp, Artificial Sequence
  Synthetic Sequence
gtaatcgcct

SEQ ID NO: 1079 - DNA, 10 bp, Artificial Sequence
  Synthetic Sequence
tccagcgaaa

SEQ ID NO: 1080 - DNA, 10 bp, Artificial Sequence
  Synthetic Sequence
caactacgaa

SEQ ID NO: 1081 - DNA, 10 bp, Artificial Sequence
  Synthetic Sequence
aatctatgaa

SEQ ID NO: 1082 - DNA, 10 bp, Artificial Sequence
  Synthetic Sequence
tgacgaccgt

SEQ ID NO: 1083 - DNA, 10 bp, Artificial Sequence
  Synthetic Sequence
catgctcatt

SEQ ID NO: 1084 - DNA, 10 bp, Artificial Sequence
  Synthetic Sequence
gtagatgtag

SEQ ID NO: 1085 - DNA, 10 bp, Artificial Sequence
  Synthetic Sequence
ttaggcccat

SEQ ID NO: 1086 - DNA, 10 bp, Artificial Sequence
  Synthetic Sequence
tcttaaggct

SEQ ID NO: 1087 - DNA, 10 bp, Artificial Sequence
  Synthetic Sequence
attcatactg

SEQ ID NO: 1088 - DNA, 10 bp, Artificial Sequence
  Synthetic Sequence
gatatgagcc

SEQ ID NO: 1089 - DNA, 10 bp, Artificial Sequence
  Synthetic Sequence
gaaccaggag

SEQ ID NO: 1090 - DNA, 10 bp, Artificial Sequence
  Synthetic Sequence
gttgcatatg

SEQ ID NO: 1091 - DNA, 10 bp, Artificial Sequence
  Synthetic Sequence
gagtcttcca

SEQ ID NO: 1092 - DNA, 10 bp, Artificial Sequence
  Synthetic Sequence
aagaatggca

SEQ ID NO: 1093 - DNA, 10 bp, Artificial Sequence
  Synthetic Sequence
ttcgggagaa

SEQ ID NO: 1094 - DNA, 10 bp, Artificial Sequence
  Synthetic Sequence
ccgtaactgt

SEQ ID NO: 1095 - DNA, 10 bp, Artificial Sequence
  Synthetic Sequence
tacttagtcg

SEQ ID NO: 1096 - DNA, 10 bp, Artificial Sequence
  Synthetic Sequence
gagcctatga

SEQ ID NO: 1097 - DNA, 10 bp, Artificial Sequence
  Synthetic Sequence
ctgactatat

SEQ ID NO: 1098 - DNA, 10 bp, Artificial Sequence
  Synthetic Sequence
aatctaagcg

SEQ ID NO: 1099 - DNA, 10 bp, Artificial Sequence
  Synthetic Sequence
atcttcaaga

SEQ ID NO: 1100 - DNA, 10 bp, Artificial Sequence
  Synthetic Sequence
ctaagccctt

SEQ ID NO: 1101 - DNA, 10 bp, Artificial Sequence
  Synthetic Sequence
acgctttcac

SEQ ID NO: 1102 - DNA, 10 bp, Artificial Sequence
  Synthetic Sequence
cacggctacg

SEQ ID NO: 1103 - DNA, 10 bp, Artificial Sequence
  Synthetic Sequence
cgggatttga

SEQ ID NO: 1104 - DNA, 10 bp, Artificial Sequence
  Synthetic Sequence
tgaagacgct

SEQ ID NO: 1105 - DNA, 10 bp, Artificial Sequence
  Synthetic Sequence
ttcaacaact

SEQ ID NO: 1106 - DNA, 10 bp, Artificial Sequence
  Synthetic Sequence
cgccagtgga

SEQ ID NO: 1107 - DNA, 10 bp, Artificial Sequence
  Synthetic Sequence
ccctgaactt

SEQ ID NO: 1108 - DNA, 10 bp, Artificial Sequence
  Synthetic Sequence
cgattcgcgc

SEQ ID NO: 1109 - DNA, 10 bp, Artificial Sequence
  Synthetic Sequence
attgcaatat

SEQ ID NO: 1110 - DNA, 10 bp, Artificial Sequence
  Synthetic Sequence
gggcgagaac

SEQ ID NO: 1111 - DNA, 10 bp, Artificial Sequence
  Synthetic Sequence
tggcgttgcg

SEQ ID NO: 1112 - DNA, 10 bp, Artificial Sequence
  Synthetic Sequence
tggtatacga

SEQ ID NO: 1113 - DNA, 10 bp, Artificial Sequence
  Synthetic Sequence
gggtcgatgc

SEQ ID NO: 1114 - DNA, 10 bp, Artificial Sequence
  Synthetic Sequence
gtaaggaaca

SEQ ID NO: 1115 - DNA, 10 bp, Artificial Sequence
  Synthetic Sequence
gtacgtataa

SEQ ID NO: 1116 - DNA, 10 bp, Artificial Sequence
  Synthetic Sequence
gaatttgtac

SEQ ID NO: 1117 - DNA, 10 bp, Artificial Sequence
  Synthetic Sequence
gccagtcgtt

SEQ ID NO: 1118 - DNA, 10 bp, Artificial Sequence
  Synthetic Sequence
ctgtatggct

SEQ ID NO: 1119 - DNA, 10 bp, Artificial Sequence
  Synthetic Sequence
catctgctgc

SEQ ID NO: 1120 - DNA, 10 bp, Artificial Sequence
  Synthetic Sequence
ccgttggctc

SEQ ID NO: 1121 - DNA, 10 bp, Artificial Sequence
  Synthetic Sequence
accgtcaccc

SEQ ID NO: 1122 - DNA, 10 bp, Artificial Sequence
  Synthetic Sequence
acagaatctt

SEQ ID NO: 1123 - DNA, 10 bp, Artificial Sequence
  Synthetic Sequence
tgcggcagct

SEQ ID NO: 1124 - DNA, 10 bp, Artificial Sequence
  Synthetic Sequence
gcctctggtt

SEQ ID NO: 1125 - DNA, 10 bp, Artificial Sequence
  Synthetic Sequence
gactagtcat

SEQ ID NO: 1126 - DNA, 10 bp, Artificial Sequence
  Synthetic Sequence
cgagaccgtt

SEQ ID NO: 1127 - DNA, 10 bp, Artificial Sequence
  Synthetic Sequence
acacccgcct

SEQ ID NO: 1128 - DNA, 10 bp, Artificial Sequence
  Synthetic Sequence
tgatcgcttg

SEQ ID NO: 1129 - DNA, 10 bp, Artificial Sequence
  Synthetic Sequence
cttatcaccg

SEQ ID NO: 1130 - DNA, 10 bp, Artificial Sequence
  Synthetic Sequence
cacagaggag

SEQ ID NO: 1131 - DNA, 10 bp, Artificial Sequence
  Synthetic Sequence
ctccttcatt

SEQ ID NO: 1132 - DNA, 10 bp, Artificial Sequence
  Synthetic Sequence
tcgtcaaagg

SEQ ID NO: 1133 - DNA, 10 bp, Artificial Sequence
  Synthetic Sequence
tgtttgacgt

SEQ ID NO: 1134 - DNA, 10 bp, Artificial Sequence
  Synthetic Sequence
ttcgcgttaa

SEQ ID NO: 1135 - DNA, 10 bp, Artificial Sequence
  Synthetic Sequence
agtggccgtg

SEQ ID NO: 1136 - DNA, 10 bp, Artificial Sequence
  Synthetic Sequence
tacaacttgc

SEQ ID NO: 1137 - DNA, 10 bp, Artificial Sequence
  Synthetic Sequence
gataaggccg

SEQ ID NO: 1138 - DNA, 10 bp, Artificial Sequence
  Synthetic Sequence
gtttgataga

SEQ ID NO: 1139 - DNA, 10 bp, Artificial Sequence
  Synthetic Sequence
ggtgacagcc

SEQ ID NO: 1140 - DNA, 10 bp, Artificial Sequence
  Synthetic Sequence
gggtgtccct

SEQ ID NO: 1141 - DNA, 10 bp, Artificial Sequence
  Synthetic Sequence
ttccactagg

SEQ ID NO: 1142 - DNA, 10 bp, Artificial Sequence
  Synthetic Sequence
agtaaactat

SEQ ID NO: 1143 - DNA, 10 bp, Artificial Sequence
  Synthetic Sequence
atggtttcga

SEQ ID NO: 1144 - DNA, 10 bp, Artificial Sequence
  Synthetic Sequence
gagaccaata

SEQ ID NO: 1145 - DNA, 10 bp, Artificial Sequence
  Synthetic Sequence
gatctcacca

SEQ ID NO: 1146 - DNA, 10 bp, Artificial Sequence
  Synthetic Sequence
acgtatcaag

SEQ ID NO: 1147 - DNA, 10 bp, Artificial Sequence
  Synthetic Sequence
gtaggccaag

SEQ ID NO: 1148 - DNA, 10 bp, Artificial Sequence
  Synthetic Sequence
gcgtaagcta

SEQ ID NO: 1149 - DNA, 10 bp, Artificial Sequence
  Synthetic Sequence
taacgccacg

SEQ ID NO: 1150 - DNA, 10 bp, Artificial Sequence
  Synthetic Sequence
gcaggactct

SEQ ID NO: 1151 - DNA, 10 bp, Artificial Sequence
  Synthetic Sequence
gtcgtttgtc

SEQ ID NO: 1152 - DNA, 10 bp, Artificial Sequence
  Synthetic Sequence
caatgatatc

SEQ ID NO: 1153 - DNA, 10 bp, Artificial Sequence
  Synthetic Sequence
tcttcatcga

SEQ ID NO: 1154 - DNA, 10 bp, Artificial Sequence
  Synthetic Sequence
tgaccaggca

SEQ ID NO: 1155 - DNA, 10 bp, Artificial Sequence
  Synthetic Sequence
ctgggttcac

SEQ ID NO: 1156 - DNA, 10 bp, Artificial Sequence
  Synthetic Sequence
ggcttataac

SEQ ID NO: 1157 - DNA, 10 bp, Artificial Sequence
  Synthetic Sequence
caatataccc

SEQ ID NO: 1158 - DNA, 10 bp, Artificial Sequence
  Synthetic Sequence
ggtaagtact

SEQ ID NO: 1159 - DNA, 10 bp, Artificial Sequence
  Synthetic Sequence
cctttcttcc

SEQ ID NO: 1160 - DNA, 10 bp, Artificial Sequence
  Synthetic Sequence
atggagatac

SEQ ID NO: 1161 - DNA, 10 bp, Artificial Sequence
  Synthetic Sequence
ttctcagact

SEQ ID NO: 1162 - DNA, 10 bp, Artificial Sequence
  Synthetic Sequence
ttgaccctcg

SEQ ID NO: 1163 - DNA, 10 bp, Artificial Sequence
  Synthetic Sequence
cagcggactt

SEQ ID NO: 1164 - DNA, 10 bp, Artificial Sequence
  Synthetic Sequence
ttctaacagc

SEQ ID NO: 1165 - DNA, 10 bp, Artificial Sequence
  Synthetic Sequence
cccatccgat

SEQ ID NO: 1166 - DNA, 10 bp, Artificial Sequence
  Synthetic Sequence
agttgcgtca

SEQ ID NO: 1167 - DNA, 10 bp, Artificial Sequence
  Synthetic Sequence
acacgctaag

SEQ ID NO: 1168 - DNA, 10 bp, Artificial Sequence
  Synthetic Sequence
cgaagagtta

SEQ ID NO: 1169 - DNA, 10 bp, Artificial Sequence
  Synthetic Sequence
gactcgttcc

SEQ ID NO: 1170 - DNA, 10 bp, Artificial Sequence
  Synthetic Sequence
ctgaccgtgc

SEQ ID NO: 1171 - DNA, 10 bp, Artificial Sequence
  Synthetic Sequence
gctaaagtgg

SEQ ID NO: 1172 - DNA, 10 bp, Artificial Sequence
  Synthetic Sequence
tgggtttagg

SEQ ID NO: 1173 - DNA, 10 bp, Artificial Sequence
  Synthetic Sequence
tctatgccat

SEQ ID NO: 1174 - DNA, 10 bp, Artificial Sequence
  Synthetic Sequence
ttggtccaac

SEQ ID NO: 1175 - DNA, 10 bp, Artificial Sequence
  Synthetic Sequence
acgactctac

SEQ ID NO: 1176 - DNA, 10 bp, Artificial Sequence
  Synthetic Sequence
gatgaggtta

SEQ ID NO: 1177 - DNA, 10 bp, Artificial Sequence
  Synthetic Sequence
atctggccat

SEQ ID NO: 1178 - DNA, 10 bp, Artificial Sequence
  Synthetic Sequence
catttgtccc

SEQ ID NO: 1179 - DNA, 10 bp, Artificial Sequence
  Synthetic Sequence
ggatagaggg

SEQ ID NO: 1180 - DNA, 10 bp, Artificial Sequence
  Synthetic Sequence
accttatacg

SEQ ID NO: 1181 - DNA, 10 bp, Artificial Sequence
  Synthetic Sequence
acacagcgac

SEQ ID NO: 1182 - DNA, 10 bp, Artificial Sequence
  Synthetic Sequence
tggagcatat

SEQ ID NO: 1183 - DNA, 10 bp, Artificial Sequence
  Synthetic Sequence
attcctctaa

SEQ ID NO: 1184 - DNA, 10 bp, Artificial Sequence
  Synthetic Sequence
atgatatgag

SEQ ID NO: 1185 - DNA, 10 bp, Artificial Sequence
  Synthetic Sequence
atttaccagc

SEQ ID NO: 1186 - DNA, 10 bp, Artificial Sequence
  Synthetic Sequence
gtactctaga

SEQ ID NO: 1187 - DNA, 10 bp, Artificial Sequence
  Synthetic Sequence
gatactgata

SEQ ID NO: 1188 - DNA, 10 bp, Artificial Sequence
  Synthetic Sequence
accacctcct

SEQ ID NO: 1189 - DNA, 10 bp, Artificial Sequence
  Synthetic Sequence
acagcatcgg

SEQ ID NO: 1190 - DNA, 10 bp, Artificial Sequence
  Synthetic Sequence
gtataatata

SEQ ID NO: 1191 - DNA, 10 bp, Artificial Sequence
  Synthetic Sequence
gtatacacat

SEQ ID NO: 1192 - DNA, 10 bp, Artificial Sequence
  Synthetic Sequence
ggactaactt

SEQ ID NO: 1193 - DNA, 10 bp, Artificial Sequence
  Synthetic Sequence
acgaaatgta

SEQ ID NO: 1194 - DNA, 10 bp, Artificial Sequence
  Synthetic Sequence
gcactggacg

SEQ ID NO: 1195 - DNA, 10 bp, Artificial Sequence
  Synthetic Sequence
ccgaagactt

SEQ ID NO: 1196 - DNA, 10 bp, Artificial Sequence
  Synthetic Sequence
aaagctctac

SEQ ID NO: 1197 - DNA, 10 bp, Artificial Sequence
  Synthetic Sequence
cctggaccag

SEQ ID NO: 1198 - DNA, 10 bp, Artificial Sequence
  Synthetic Sequence
atcactaaga

SEQ ID NO: 1199 - DNA, 10 bp, Artificial Sequence
  Synthetic Sequence
ttcgcgatgc

SEQ ID NO: 1200 - DNA, 10 bp, Artificial Sequence
  Synthetic Sequence
gaatccatgg

SEQ ID NO: 1201 - DNA, 10 bp, Artificial Sequence
  Synthetic Sequence
aatccagcat

SEQ ID NO: 1202 - DNA, 10 bp, Artificial Sequence
  Synthetic Sequence
gccgaagata

SEQ ID NO: 1203 - DNA, 10 bp, Artificial Sequence
  Synthetic Sequence
tccgcgaagg

SEQ ID NO: 1204 - DNA, 10 bp, Artificial Sequence
  Synthetic Sequence
cttgattaaa

SEQ ID NO: 1205 - DNA, 10 bp, Artificial Sequence
  Synthetic Sequence
agctccagta

SEQ ID NO: 1206 - DNA, 10 bp, Artificial Sequence
  Synthetic Sequence
agtaacgact

SEQ ID NO: 1207 - DNA, 10 bp, Artificial Sequence
  Synthetic Sequence
gccttgaccg

SEQ ID NO: 1208 - DNA, 10 bp, Artificial Sequence
  Synthetic Sequence
gtcagcgacc

SEQ ID NO: 1209 - DNA, 10 bp, Artificial Sequence
  Synthetic Sequence
tgtggtgcaa

SEQ ID NO: 1210 - DNA, 10 bp, Artificial Sequence
  Synthetic Sequence
tctcgttcct

SEQ ID NO: 1211 - DNA, 10 bp, Artificial Sequence
  Synthetic Sequence
gctcgatccc

SEQ ID NO: 1212 - DNA, 10 bp, Artificial Sequence
  Synthetic Sequence
taagcggtgg

SEQ ID NO: 1213 - DNA, 10 bp, Artificial Sequence
  Synthetic Sequence
cctcaacggt

SEQ ID NO: 1214 - DNA, 10 bp, Artificial Sequence
  Synthetic Sequence
ttaacttcgt

SEQ ID NO: 1215 - DNA, 10 bp, Artificial Sequence
  Synthetic Sequence
tccaacgggt

SEQ ID NO: 1216 - DNA, 10 bp, Artificial Sequence
  Synthetic Sequence
aggtggcgtt

SEQ ID NO: 1217 - DNA, 10 bp, Artificial Sequence
  Synthetic Sequence
tttataggga

SEQ ID NO: 1218 - DNA, 10 bp, Artificial Sequence
  Synthetic Sequence
tgacaattaa

SEQ ID NO: 1219 - DNA, 10 bp, Artificial Sequence
  Synthetic Sequence
atacgcttac

SEQ ID NO: 1220 - DNA, 10 bp, Artificial Sequence
  Synthetic Sequence
tgtccctgac

SEQ ID NO: 1221 - DNA, 10 bp, Artificial Sequence
  Synthetic Sequence
ttaaatgagc

SEQ ID NO: 1222 - DNA, 10 bp, Artificial Sequence
  Synthetic Sequence
ggaatccaac

SEQ ID NO: 1223 - DNA, 10 bp, Artificial Sequence
  Synthetic Sequence
gaggtatttg

SEQ ID NO: 1224 - DNA, 10 bp, Artificial Sequence
  Synthetic Sequence
cagaccatct

SEQ ID NO: 1225 - DNA, 10 bp, Artificial Sequence
  Synthetic Sequence
catcttgcgg

SEQ ID NO: 1226 - DNA, 10 bp, Artificial Sequence
  Synthetic Sequence
gaaatccgaa

SEQ ID NO: 1227 - DNA, 10 bp, Artificial Sequence
  Synthetic Sequence
catcaacctt

SEQ ID NO: 1228 - DNA, 10 bp, Artificial Sequence
  Synthetic Sequence
gggtagtatg

SEQ ID NO: 1229 - DNA, 10 bp, Artificial Sequence
  Synthetic Sequence
ccggcaaatc

SEQ ID NO: 1230 - DNA, 10 bp, Artificial Sequence
  Synthetic Sequence
cgagccgaca

SEQ ID NO: 1231 - DNA, 10 bp, Artificial Sequence
  Synthetic Sequence
gcatcttaca

SEQ ID NO: 1232 - DNA, 10 bp, Artificial Sequence
  Synthetic Sequence
cggattaaga

SEQ ID NO: 1233 - DNA, 10 bp, Artificial Sequence
  Synthetic Sequence
attcggtact

SEQ ID NO: 1234 - DNA, 10 bp, Artificial Sequence
  Synthetic Sequence
tcagttcatg

SEQ ID NO: 1235 - DNA, 10 bp, Artificial Sequence
  Synthetic Sequence
gagtctccat

SEQ ID NO: 1236 - DNA, 10 bp, Artificial Sequence
  Synthetic Sequence
cggaccggta

SEQ ID NO: 1237 - DNA, 10 bp, Artificial Sequence
  Synthetic Sequence
tacacatctc

SEQ ID NO: 1238 - DNA, 10 bp, Artificial Sequence
  Synthetic Sequence
ctggattacc

SEQ ID NO: 1239 - DNA, 10 bp, Artificial Sequence
  Synthetic Sequence
tgacgtactt

SEQ ID NO: 1240 - DNA, 10 bp, Artificial Sequence
  Synthetic Sequence
ccctagagga

SEQ ID NO: 1241 - DNA, 10 bp, Artificial Sequence
  Synthetic Sequence
aatctttcga

SEQ ID NO: 1242 - DNA, 10 bp, Artificial Sequence
  Synthetic Sequence
cattcttgct

SEQ ID NO: 1243 - DNA, 10 bp, Artificial Sequence
  Synthetic Sequence
acaatactta

SEQ ID NO: 1244 - DNA, 10 bp, Artificial Sequence
  Synthetic Sequence
gagatcagct

SEQ ID NO: 1245 - DNA, 10 bp, Artificial Sequence
  Synthetic Sequence
ccaatctacc

SEQ ID NO: 1246 - DNA, 10 bp, Artificial Sequence
  Synthetic Sequence
ataactcctg

SEQ ID NO: 1247 - DNA, 10 bp, Artificial Sequence
  Synthetic Sequence
ctgacgcaga

SEQ ID NO: 1248 - DNA, 10 bp, Artificial Sequence
  Synthetic Sequence
cccaaaggtt

SEQ ID NO: 1249 - DNA, 10 bp, Artificial Sequence
  Synthetic Sequence
cactgattaa

SEQ ID NO: 1250 - DNA, 10 bp, Artificial Sequence
  Synthetic Sequence
aggaccaaac

SEQ ID NO: 1251 - DNA, 10 bp, Artificial Sequence
  Synthetic Sequence
ccctcaggta

SEQ ID NO: 1252 - DNA, 10 bp, Artificial Sequence
  Synthetic Sequence
aggcttgtca

SEQ ID NO: 1253 - DNA, 10 bp, Artificial Sequence
  Synthetic Sequence
tcgtagtact

SEQ ID NO: 1254 - DNA, 10 bp, Artificial Sequence
  Synthetic Sequence
aatacgcact

SEQ ID NO: 1255 - DNA, 10 bp, Artificial Sequence
  Synthetic Sequence
ccaacgaatt

SEQ ID NO: 1256 - DNA, 10 bp, Artificial Sequence
  Synthetic Sequence
tcgcggacag

SEQ ID NO: 1257 - DNA, 10 bp, Artificial Sequence
  Synthetic Sequence
gagcgtggga

SEQ ID NO: 1258 - DNA, 10 bp, Artificial Sequence
  Synthetic Sequence
agtgggaggg

SEQ ID NO: 1259 - DNA, 10 bp, Artificial Sequence
  Synthetic Sequence
cgaatactct

SEQ ID NO: 1260 - DNA, 10 bp, Artificial Sequence
  Synthetic Sequence
tggcgcgaca

SEQ ID NO: 1261 - DNA, 10 bp, Artificial Sequence
  Synthetic Sequence
ggtatcccgc

SEQ ID NO: 1262 - DNA, 10 bp, Artificial Sequence
  Synthetic Sequence
tttcttatta

SEQ ID NO: 1263 - DNA, 10 bp, Artificial Sequence
  Synthetic Sequence
gagctaagta

SEQ ID NO: 1264 - DNA, 10 bp, Artificial Sequence
  Synthetic Sequence
gtggtaatgc

SEQ ID NO: 1265 - DNA, 10 bp, Artificial Sequence
  Synthetic Sequence
tacgtgattg

SEQ ID NO: 1266 - DNA, 10 bp, Artificial Sequence
  Synthetic Sequence
cgcatgatcc

SEQ ID NO: 1267 - DNA, 10 bp, Artificial Sequence
  Synthetic Sequence
gagaaacgtt

SEQ ID NO: 1268 - DNA, 10 bp, Artificial Sequence
  Synthetic Sequence
acgaccgacc

SEQ ID NO: 1269 - DNA, 10 bp, Artificial Sequence
  Synthetic Sequence
tacgtacaat

SEQ ID NO: 1270 - DNA, 10 bp, Artificial Sequence
  Synthetic Sequence
actcgaccga

SEQ ID NO: 1271 - DNA, 10 bp, Artificial Sequence
  Synthetic Sequence
gcttcaggcg

SEQ ID NO: 1272 - DNA, 10 bp, Artificial Sequence
  Synthetic Sequence
gtacaaggct

SEQ ID NO: 1273 - DNA, 10 bp, Artificial Sequence
  Synthetic Sequence
ttgtcaaata

SEQ ID NO: 1274 - DNA, 10 bp, Artificial Sequence
  Synthetic Sequence
agatttgtgc

SEQ ID NO: 1275 - DNA, 10 bp, Artificial Sequence
  Synthetic Sequence
cgtagactag

SEQ ID NO: 1276 - DNA, 10 bp, Artificial Sequence
  Synthetic Sequence
tacataaatg

SEQ ID NO: 1277 - DNA, 10 bp, Artificial Sequence
  Synthetic Sequence
agttggaacg

SEQ ID NO: 1278 - DNA, 10 bp, Artificial Sequence
  Synthetic Sequence
atcttgatct

SEQ ID NO: 1279 - DNA, 10 bp, Artificial Sequence
  Synthetic Sequence
caggatctcg

SEQ ID NO: 1280 - DNA, 10 bp, Artificial Sequence
  Synthetic Sequence
gaagcagagc

SEQ ID NO: 1281 - DNA, 10 bp, Artificial Sequence
  Synthetic Sequence
cggtggattc

SEQ ID NO: 1282 - DNA, 10 bp, Artificial Sequence
  Synthetic Sequence
tttatgctag

SEQ ID NO: 1283 - DNA, 10 bp, Artificial Sequence
  Synthetic Sequence
gtcatattag

SEQ ID NO: 1284 - DNA, 10 bp, Artificial Sequence
  Synthetic Sequence
gtttcgccta

SEQ ID NO: 1285 - DNA, 10 bp, Artificial Sequence
  Synthetic Sequence
cccactgaac

SEQ ID NO: 1286 - DNA, 10 bp, Artificial Sequence
  Synthetic Sequence
ttggttaatg

SEQ ID NO: 1287 - DNA, 10 bp, Artificial Sequence
  Synthetic Sequence
agtcaccaac

SEQ ID NO: 1288 - DNA, 10 bp, Artificial Sequence
  Synthetic Sequence
aaacttactt

SEQ ID NO: 1289 - DNA, 10 bp, Artificial Sequence
  Synthetic Sequence
catatcagtg

SEQ ID NO: 1290 - DNA, 10 bp, Artificial Sequence
  Synthetic Sequence
tctgttggtg

SEQ ID NO: 1291 - DNA, 10 bp, Artificial Sequence
  Synthetic Sequence
gtctaattat

SEQ ID NO: 1292 - DNA, 10 bp, Artificial Sequence
  Synthetic Sequence
acaataccag

SEQ ID NO: 1293 - DNA, 10 bp, Artificial Sequence
  Synthetic Sequence
agagaatacg

SEQ ID NO: 1294 - DNA, 10 bp, Artificial Sequence
  Synthetic Sequence
cgacgacgtt

SEQ ID NO: 1295 - DNA, 10 bp, Artificial Sequence
  Synthetic Sequence
gcattccaat

SEQ ID NO: 1296 - DNA, 10 bp, Artificial Sequence
  Synthetic Sequence
aggtgttcaa

SEQ ID NO: 1297 - DNA, 10 bp, Artificial Sequence
  Synthetic Sequence
gacgtagatc

SEQ ID NO: 1298 - DNA, 10 bp, Artificial Sequence
  Synthetic Sequence
tcaatcttct

SEQ ID NO: 1299 - DNA, 10 bp, Artificial Sequence
  Synthetic Sequence
gattcatact

SEQ ID NO: 1300 - DNA, 10 bp, Artificial Sequence
  Synthetic Sequence
gcctcgtcag

SEQ ID NO: 1301 - DNA, 10 bp, Artificial Sequence
  Synthetic Sequence
tgaaagagaa

SEQ ID NO: 1302 - DNA, 10 bp, Artificial Sequence
  Synthetic Sequence
atatggtaaa

SEQ ID NO: 1303 - DNA, 10 bp, Artificial Sequence
  Synthetic Sequence
gcctatatac

SEQ ID NO: 1304 - DNA, 10 bp, Artificial Sequence
  Synthetic Sequence
gttcatctta

SEQ ID NO: 1305 - DNA, 10 bp, Artificial Sequence
  Synthetic Sequence
gttacgtgac

SEQ ID NO: 1306 - DNA, 10 bp, Artificial Sequence
  Synthetic Sequence
ggccaagaaa

SEQ ID NO: 1307 - DNA, 10 bp, Artificial Sequence
  Synthetic Sequence
actgtgcctg

SEQ ID NO: 1308 - DNA, 10 bp, Artificial Sequence
  Synthetic Sequence
cgcgctcact

SEQ ID NO: 1309 - DNA, 10 bp, Artificial Sequence
  Synthetic Sequence
ataacgtctc

SEQ ID NO: 1310 - DNA, 10 bp, Artificial Sequence
  Synthetic Sequence
ccaacagaca

SEQ ID NO: 1311 - DNA, 10 bp, Artificial Sequence
  Synthetic Sequence
gctgacatgt

SEQ ID NO: 1312 - DNA, 10 bp, Artificial Sequence
  Synthetic Sequence
atctacatgg

SEQ ID NO: 1313 - DNA, 10 bp, Artificial Sequence
  Synthetic Sequence
agttcgacca

SEQ ID NO: 1314 - DNA, 10 bp, Artificial Sequence
  Synthetic Sequence
agaggcttat

SEQ ID NO: 1315 - DNA, 10 bp, Artificial Sequence
  Synthetic Sequence
gtacgttagc

SEQ ID NO: 1316 - DNA, 10 bp, Artificial Sequence
  Synthetic Sequence
aactatgggt

SEQ ID NO: 1317 - DNA, 10 bp, Artificial Sequence
  Synthetic Sequence
tcagtcgctc

SEQ ID NO: 1318 - DNA, 10 bp, Artificial Sequence
  Synthetic Sequence
tcgcctgtgt

SEQ ID NO: 1319 - DNA, 10 bp, Artificial Sequence
  Synthetic Sequence
tcagaaactg

SEQ ID NO: 1320 - DNA, 10 bp, Artificial Sequence
  Synthetic Sequence
tacgtgtgcc

SEQ ID NO: 1321 - DNA, 10 bp, Artificial Sequence
  Synthetic Sequence
cgctcttaca

SEQ ID NO: 1322 - DNA, 10 bp, Artificial Sequence
  Synthetic Sequence
actagcagcg

SEQ ID NO: 1323 - DNA, 10 bp, Artificial Sequence
  Synthetic Sequence
ttctcgaggg

SEQ ID NO: 1324 - DNA, 10 bp, Artificial Sequence
  Synthetic Sequence
atctctgtca

SEQ ID NO: 1325 - DNA, 10 bp, Artificial Sequence
  Synthetic Sequence
ttgccgttgc

SEQ ID NO: 1326 - DNA, 10 bp, Artificial Sequence
  Synthetic Sequence
tacatggacg

SEQ ID NO: 1327 - DNA, 10 bp, Artificial Sequence
  Synthetic Sequence
ctagacgtac

SEQ ID NO: 1328 - DNA, 10 bp, Artificial Sequence
  Synthetic Sequence
cttgaccatt

SEQ ID NO: 1329 - DNA, 10 bp, Artificial Sequence
  Synthetic Sequence
accgcacatg

SEQ ID NO: 1330 - DNA, 10 bp, Artificial Sequence
  Synthetic Sequence
aggcacacac

SEQ ID NO: 1331 - DNA, 10 bp, Artificial Sequence
  Synthetic Sequence
tagtttgcca

SEQ ID NO: 1332 - DNA, 10 bp, Artificial Sequence
  Synthetic Sequence
tgacagacgc

SEQ ID NO: 1333 - DNA, 10 bp, Artificial Sequence
  Synthetic Sequence
acaagcaagt

SEQ ID NO: 1334 - DNA, 10 bp, Artificial Sequence
  Synthetic Sequence
cagtgcacca

SEQ ID NO: 1335 - DNA, 10 bp, Artificial Sequence
  Synthetic Sequence
cggtcgtttg

SEQ ID NO: 1336 - DNA, 10 bp, Artificial Sequence
  Synthetic Sequence
aacagtcttc

SEQ ID NO: 1337 - DNA, 10 bp, Artificial Sequence
  Synthetic Sequence
tcagtatgtt

SEQ ID NO: 1338 - DNA, 10 bp, Artificial Sequence
  Synthetic Sequence
cacatactga

SEQ ID NO: 1339 - DNA, 10 bp, Artificial Sequence
  Synthetic Sequence
taaggtcggg

SEQ ID NO: 1340 - DNA, 10 bp, Artificial Sequence
  Synthetic Sequence
aacgtctcgg

SEQ ID NO: 1341 - DNA, 10 bp, Artificial Sequence
  Synthetic Sequence
cgccatccta

SEQ ID NO: 1342 - DNA, 10 bp, Artificial Sequence
  Synthetic Sequence
gctaattcag

SEQ ID NO: 1343 - DNA, 10 bp, Artificial Sequence
  Synthetic Sequence
ctgtagtctt

SEQ ID NO: 1344 - DNA, 10 bp, Artificial Sequence
  Synthetic Sequence
agaaatatgc

SEQ ID NO: 1345 - DNA, 10 bp, Artificial Sequence
  Synthetic Sequence
ccatcatgac

SEQ ID NO: 1346 - DNA, 10 bp, Artificial Sequence
  Synthetic Sequence
ccgcagtcgt

SEQ ID NO: 1347 - DNA, 10 bp, Artificial Sequence
  Synthetic Sequence
ctggacagaa

SEQ ID NO: 1348 - DNA, 10 bp, Artificial Sequence
  Synthetic Sequence
ccttctgtgc

SEQ ID NO: 1349 - DNA, 10 bp, Artificial Sequence
  Synthetic Sequence
ggatcaagtt

SEQ ID NO: 1350 - DNA, 10 bp, Artificial Sequence
  Synthetic Sequence
aaaggtcgaa

SEQ ID NO: 1351 - DNA, 10 bp, Artificial Sequence
  Synthetic Sequence
gacccggtag

SEQ ID NO: 1352 - DNA, 10 bp, Artificial Sequence
  Synthetic Sequence
tggctatgat

SEQ ID NO: 1353 - DNA, 10 bp, Artificial Sequence
  Synthetic Sequence
agtcctaccg

SEQ ID NO: 1354 - DNA, 10 bp, Artificial Sequence
  Synthetic Sequence
ctaagcttca

SEQ ID NO: 1355 - DNA, 10 bp, Artificial Sequence
  Synthetic Sequence
ggataagcac

SEQ ID NO: 1356 - DNA, 10 bp, Artificial Sequence
  Synthetic Sequence
cttcgtcgca

SEQ ID NO: 1357 - DNA, 10 bp, Artificial Sequence
  Synthetic Sequence
acccgtaggt

SEQ ID NO: 1358 - DNA, 10 bp, Artificial Sequence
  Synthetic Sequence
tgaccgcaac

SEQ ID NO: 1359 - DNA, 10 bp, Artificial Sequence
  Synthetic Sequence
tgctgtccac

SEQ ID NO: 1360 - DNA, 10 bp, Artificial Sequence
  Synthetic Sequence
ggtgccgctt

SEQ ID NO: 1361 - DNA, 10 bp, Artificial Sequence
  Synthetic Sequence
ctaactcagg

SEQ ID NO: 1362 - DNA, 10 bp, Artificial Sequence
  Synthetic Sequence
agctgggatc

SEQ ID NO: 1363 - DNA, 10 bp, Artificial Sequence
  Synthetic Sequence
ttcgagctag

SEQ ID NO: 1364 - DNA, 10 bp, Artificial Sequence
  Synthetic Sequence
tctgtgaacg

SEQ ID NO: 1365 - DNA, 10 bp, Artificial Sequence
  Synthetic Sequence
ccatggataa

SEQ ID NO: 1366 - DNA, 10 bp, Artificial Sequence
  Synthetic Sequence
gagccaagcc

SEQ ID NO: 1367 - DNA, 10 bp, Artificial Sequence
  Synthetic Sequence
acatccctca

SEQ ID NO: 1368 - DNA, 10 bp, Artificial Sequence
  Synthetic Sequence
ttggatagct

SEQ ID NO: 1369 - DNA, 10 bp, Artificial Sequence
  Synthetic Sequence
taaagttcga

SEQ ID NO: 1370 - DNA, 10 bp, Artificial Sequence
  Synthetic Sequence
attcacaccc

SEQ ID NO: 1371 - DNA, 10 bp, Artificial Sequence
  Synthetic Sequence
gcgttacctc

SEQ ID NO: 1372 - DNA, 10 bp, Artificial Sequence
  Synthetic Sequence
cttccgaagg

SEQ ID NO: 1373 - DNA, 10 bp, Artificial Sequence
  Synthetic Sequence
gccaaatatc

SEQ ID NO: 1374 - DNA, 10 bp, Artificial Sequence
  Synthetic Sequence
ttaaggtgca

SEQ ID NO: 1375 - DNA, 10 bp, Artificial Sequence
  Synthetic Sequence
gtttctccgc

SEQ ID NO: 1376 - DNA, 10 bp, Artificial Sequence
  Synthetic Sequence
cgcgactcat

SEQ ID NO: 1377 - DNA, 10 bp, Artificial Sequence
  Synthetic Sequence
ctgggcatat

SEQ ID NO: 1378 - DNA, 10 bp, Artificial Sequence
  Synthetic Sequence
aagcatcgat

SEQ ID NO: 1379 - DNA, 10 bp, Artificial Sequence
  Synthetic Sequence
cataccctat

SEQ ID NO: 1380 - DNA, 10 bp, Artificial Sequence
  Synthetic Sequence
tcatcggaca

SEQ ID NO: 1381 - DNA, 10 bp, Artificial Sequence
  Synthetic Sequence
tctgaagatg

SEQ ID NO: 1382 - DNA, 10 bp, Artificial Sequence
  Synthetic Sequence
acataactgc

SEQ ID NO: 1383 - DNA, 10 bp, Artificial Sequence
  Synthetic Sequence
ataccaggtg

SEQ ID NO: 1384 - DNA, 10 bp, Artificial Sequence
  Synthetic Sequence
ggagagtagg

SEQ ID NO: 1385 - DNA, 10 bp, Artificial Sequence
  Synthetic Sequence
tctgcgtcgt

SEQ ID NO: 1386 - DNA, 10 bp, Artificial Sequence
  Synthetic Sequence
catctaatgt

SEQ ID NO: 1387 - DNA, 10 bp, Artificial Sequence
  Synthetic Sequence
gtattgctaa

SEQ ID NO: 1388 - DNA, 10 bp, Artificial Sequence
  Synthetic Sequence
agggtaaatt

SEQ ID NO: 1389 - DNA, 10 bp, Artificial Sequence
  Synthetic Sequence
ggtctgtagt

SEQ ID NO: 1390 - DNA, 10 bp, Artificial Sequence
  Synthetic Sequence
ttcctggcga

SEQ ID NO: 1391 - DNA, 10 bp, Artificial Sequence
  Synthetic Sequence
gttggacagc

SEQ ID NO: 1392 - DNA, 10 bp, Artificial Sequence
  Synthetic Sequence
gggtgcacag

SEQ ID NO: 1393 - DNA, 10 bp, Artificial Sequence
  Synthetic Sequence
cagagtagtc

SEQ ID NO: 1394 - DNA, 10 bp, Artificial Sequence
  Synthetic Sequence
ttatgcaaca

SEQ ID NO: 1395 - DNA, 10 bp, Artificial Sequence
  Synthetic Sequence
gtccctagcc

SEQ ID NO: 1396 - DNA, 10 bp, Artificial Sequence
  Synthetic Sequence
ccagtgactc

SEQ ID NO: 1397 - DNA, 10 bp, Artificial Sequence
  Synthetic Sequence
gaggtagggt

SEQ ID NO: 1398 - DNA, 10 bp, Artificial Sequence
  Synthetic Sequence
cttacacgct

SEQ ID NO: 1399 - DNA, 10 bp, Artificial Sequence
  Synthetic Sequence
tgagttgcgt

SEQ ID NO: 1400 - DNA, 10 bp, Artificial Sequence
  Synthetic Sequence
ggtgatgcag

SEQ ID NO: 1401 - DNA, 10 bp, Artificial Sequence
  Synthetic Sequence
acacataccc

SEQ ID NO: 1402 - DNA, 10 bp, Artificial Sequence
  Synthetic Sequence
atccagaata

SEQ ID NO: 1403 - DNA, 10 bp, Artificial Sequence
  Synthetic Sequence
tcgtgcgcct

SEQ ID NO: 1404 - DNA, 10 bp, Artificial Sequence
  Synthetic Sequence
acagcttgct

SEQ ID NO: 1405 - DNA, 10 bp, Artificial Sequence
  Synthetic Sequence
cgacccacct

SEQ ID NO: 1406 - DNA, 10 bp, Artificial Sequence
  Synthetic Sequence
gtcgaatatt

SEQ ID NO: 1407 - DNA, 10 bp, Artificial Sequence
  Synthetic Sequence
aacaggagtt

SEQ ID NO: 1408 - DNA, 10 bp, Artificial Sequence
  Synthetic Sequence
gactaccgtt

SEQ ID NO: 1409 - DNA, 10 bp, Artificial Sequence
  Synthetic Sequence
caaagtcgat

SEQ ID NO: 1410 - DNA, 10 bp, Artificial Sequence
  Synthetic Sequence
aaggaggccc

SEQ ID NO: 1411 - DNA, 10 bp, Artificial Sequence
  Synthetic Sequence
agtgacctcc

SEQ ID NO: 1412 - DNA, 10 bp, Artificial Sequence
  Synthetic Sequence
gtactataac

SEQ ID NO: 1413 - DNA, 10 bp, Artificial Sequence
  Synthetic Sequence
catggtaatg

SEQ ID NO: 1414 - DNA, 10 bp, Artificial Sequence
  Synthetic Sequence
caaggtacta

SEQ ID NO: 1415 - DNA, 10 bp, Artificial Sequence
  Synthetic Sequence
gtaatgctcg

SEQ ID NO: 1416 - DNA, 10 bp, Artificial Sequence
  Synthetic Sequence
tcgggagcca

SEQ ID NO: 1417 - DNA, 10 bp, Artificial Sequence
  Synthetic Sequence
tcttcggagg

SEQ ID NO: 1418 - DNA, 10 bp, Artificial Sequence
  Synthetic Sequence
caagtcaatg

SEQ ID NO: 1419 - DNA, 10 bp, Artificial Sequence
  Synthetic Sequence
atgatcgcca

SEQ ID NO: 1420 - DNA, 10 bp, Artificial Sequence
  Synthetic Sequence
tccgttcgcc

SEQ ID NO: 1421 - DNA, 10 bp, Artificial Sequence
  Synthetic Sequence
gtccatgcaa

SEQ ID NO: 1422 - DNA, 10 bp, Artificial Sequence
  Synthetic Sequence
gtttacatgc

SEQ ID NO: 1423 - DNA, 10 bp, Artificial Sequence
  Synthetic Sequence
aatggtattc

SEQ ID NO: 1424 - DNA, 10 bp, Artificial Sequence
  Synthetic Sequence
aggttagatc

SEQ ID NO: 1425 - DNA, 10 bp, Artificial Sequence
  Synthetic Sequence
acgacagtgt

SEQ ID NO: 1426 - DNA, 10 bp, Artificial Sequence
  Synthetic Sequence
taatgaggga

SEQ ID NO: 1427 - DNA, 10 bp, Artificial Sequence
  Synthetic Sequence
gactaccaga

SEQ ID NO: 1428 - DNA, 10 bp, Artificial Sequence
  Synthetic Sequence
catcgtatat

SEQ ID NO: 1429 - DNA, 10 bp, Artificial Sequence
  Synthetic Sequence
tgattagaag

SEQ ID NO: 1430 - DNA, 10 bp, Artificial Sequence
  Synthetic Sequence
ggcggattcc

SEQ ID NO: 1431 - DNA, 10 bp, Artificial Sequence
  Synthetic Sequence
acaccgtccc

SEQ ID NO: 1432 - DNA, 10 bp, Artificial Sequence
  Synthetic Sequence
atcccgagat

SEQ ID NO: 1433 - DNA, 10 bp, Artificial Sequence
  Synthetic Sequence
ataaggttgt

SEQ ID NO: 1434 - DNA, 10 bp, Artificial Sequence
  Synthetic Sequence
cgtctaattc

SEQ ID NO: 1435 - DNA, 10 bp, Artificial Sequence
  Synthetic Sequence
taatgctggt

SEQ ID NO: 1436 - DNA, 10 bp, Artificial Sequence
  Synthetic Sequence
tattaccaat

SEQ ID NO: 1437 - DNA, 10 bp, Artificial Sequence
  Synthetic Sequence
gttgtgtcgt

SEQ ID NO: 1438 - DNA, 10 bp, Artificial Sequence
  Synthetic Sequence
ccgcaagtag

SEQ ID NO: 1439 - DNA, 10 bp, Artificial Sequence
  Synthetic Sequence
cgacccgtta

SEQ ID NO: 1440 - DNA, 10 bp, Artificial Sequence
  Synthetic Sequence
agcccaggac

SEQ ID NO: 1441 - DNA, 10 bp, Artificial Sequence
  Synthetic Sequence
cacaggcaga

SEQ ID NO: 1442 - DNA, 10 bp, Artificial Sequence
  Synthetic Sequence
aatttagccg

SEQ ID NO: 1443 - DNA, 10 bp, Artificial Sequence
  Synthetic Sequence
aacacgggcg

SEQ ID NO: 1444 - DNA, 10 bp, Artificial Sequence
  Synthetic Sequence
agaggaagaa

SEQ ID NO: 1445 - DNA, 10 bp, Artificial Sequence
  Synthetic Sequence
ctttaaacca

SEQ ID NO: 1446 - DNA, 10 bp, Artificial Sequence
  Synthetic Sequence
aatgactgtg

SEQ ID NO: 1447 - DNA, 10 bp, Artificial Sequence
  Synthetic Sequence
aaagagcgtg

SEQ ID NO: 1448 - DNA, 10 bp, Artificial Sequence
  Synthetic Sequence
tcaaatggtg

SEQ ID NO: 1449 - DNA, 10 bp, Artificial Sequence
  Synthetic Sequence
tctctgtgga

SEQ ID NO: 1450 - DNA, 10 bp, Artificial Sequence
  Synthetic Sequence
gagaggatag

SEQ ID NO: 1451 - DNA, 10 bp, Artificial Sequence
  Synthetic Sequence
gtggcgtacc

SEQ ID NO: 1452 - DNA, 10 bp, Artificial Sequence
  Synthetic Sequence
ttcaattgac

SEQ ID NO: 1453 - DNA, 10 bp, Artificial Sequence
  Synthetic Sequence
aagtgtcgca

SEQ ID NO: 1454 - DNA, 10 bp, Artificial Sequence
  Synthetic Sequence
ccgagatcta

SEQ ID NO: 1455 - DNA, 10 bp, Artificial Sequence
  Synthetic Sequence
cgccacgtag

SEQ ID NO: 1456 - DNA, 10 bp, Artificial Sequence
  Synthetic Sequence
cctaagataa

SEQ ID NO: 1457 - DNA, 10 bp, Artificial Sequence
  Synthetic Sequence
ggcgtaaggc

SEQ ID NO: 1458 - DNA, 10 bp, Artificial Sequence
  Synthetic Sequence
aatatcccgt

SEQ ID NO: 1459 - DNA, 10 bp, Artificial Sequence
  Synthetic Sequence
cctccctcgt

SEQ ID NO: 1460 - DNA, 10 bp, Artificial Sequence
  Synthetic Sequence
cactgcggct

SEQ ID NO: 1461 - DNA, 10 bp, Artificial Sequence
  Synthetic Sequence
tacacccttt

SEQ ID NO: 1462 - DNA, 10 bp, Artificial Sequence
  Synthetic Sequence
tagctgggtt

SEQ ID NO: 1463 - DNA, 10 bp, Artificial Sequence
  Synthetic Sequence
cgagtgagtt

SEQ ID NO: 1464 - DNA, 10 bp, Artificial Sequence
  Synthetic Sequence
cccggaagtg

SEQ ID NO: 1465 - DNA, 10 bp, Artificial Sequence
  Synthetic Sequence
gatgggttga

SEQ ID NO: 1466 - DNA, 10 bp, Artificial Sequence
  Synthetic Sequence
ctcttccacc

SEQ ID NO: 1467 - DNA, 10 bp, Artificial Sequence
  Synthetic Sequence
aaaggacgcg

SEQ ID NO: 1468 - DNA, 10 bp, Artificial Sequence
  Synthetic Sequence
cgcctagata

SEQ ID NO: 1469 - DNA, 10 bp, Artificial Sequence
  Synthetic Sequence
tagggacagt

SEQ ID NO: 1470 - DNA, 10 bp, Artificial Sequence
  Synthetic Sequence
gccaaccacc

SEQ ID NO: 1471 - DNA, 10 bp, Artificial Sequence
  Synthetic Sequence
cgagaattgg

SEQ ID NO: 1472 - DNA, 10 bp, Artificial Sequence
  Synthetic Sequence
acacggcttt

SEQ ID NO: 1473 - DNA, 10 bp, Artificial Sequence
  Synthetic Sequence
tgcgggatag

SEQ ID NO: 1474 - DNA, 10 bp, Artificial Sequence
  Synthetic Sequence
taagactagt

SEQ ID NO: 1475 - DNA, 10 bp, Artificial Sequence
  Synthetic Sequence
gggtttaacc

SEQ ID NO: 1476 - DNA, 10 bp, Artificial Sequence
  Synthetic Sequence
ggtgctcgca

SEQ ID NO: 1477 - DNA, 10 bp, Artificial Sequence
  Synthetic Sequence
gaaacactgt

SEQ ID NO: 1478 - DNA, 10 bp, Artificial Sequence
  Synthetic Sequence
gcctattcaa

SEQ ID NO: 1479 - DNA, 10 bp, Artificial Sequence
  Synthetic Sequence
gcgactttcg

SEQ ID NO: 1480 - DNA, 10 bp, Artificial Sequence
  Synthetic Sequence
cacccacatc

SEQ ID NO: 1481 - DNA, 10 bp, Artificial Sequence
  Synthetic Sequence
aggcaacctt

SEQ ID NO: 1482 - DNA, 10 bp, Artificial Sequence
  Synthetic Sequence
cgtttcttaa

SEQ ID NO: 1483 - DNA, 10 bp, Artificial Sequence
  Synthetic Sequence
atggactacg

SEQ ID NO: 1484 - DNA, 10 bp, Artificial Sequence
  Synthetic Sequence
ttcctcggtg

SEQ ID NO: 1485 - DNA, 10 bp, Artificial Sequence
  Synthetic Sequence
gaactagtct

SEQ ID NO: 1486 - DNA, 10 bp, Artificial Sequence
  Synthetic Sequence
cctcggtaac

SEQ ID NO: 1487 - DNA, 10 bp, Artificial Sequence
  Synthetic Sequence
ggcgtgaatc

SEQ ID NO: 1488 - DNA, 10 bp, Artificial Sequence
  Synthetic Sequence
ggcctctgca

SEQ ID NO: 1489 - DNA, 10 bp, Artificial Sequence
  Synthetic Sequence
ttagcttaga

SEQ ID NO: 1490 - DNA, 10 bp, Artificial Sequence
  Synthetic Sequence
gggatacgtg

SEQ ID NO: 1491 - DNA, 10 bp, Artificial Sequence
  Synthetic Sequence
ttcgctcacc

SEQ ID NO: 1492 - DNA, 10 bp, Artificial Sequence
  Synthetic Sequence
gacgctcgaa

SEQ ID NO: 1493 - DNA, 10 bp, Artificial Sequence
  Synthetic Sequence
atggattatt

SEQ ID NO: 1494 - DNA, 10 bp, Artificial Sequence
  Synthetic Sequence
cgtagcccta

SEQ ID NO: 1495 - DNA, 10 bp, Artificial Sequence
  Synthetic Sequence
ttgaattgtt

SEQ ID NO: 1496 - DNA, 10 bp, Artificial Sequence
  Synthetic Sequence
tggtatggac

SEQ ID NO: 1497 - DNA, 10 bp, Artificial Sequence
  Synthetic Sequence
tagaacaggc

SEQ ID NO: 1498 - DNA, 10 bp, Artificial Sequence
  Synthetic Sequence
ccgcttgttg

SEQ ID NO: 1499 - DNA, 10 bp, Artificial Sequence
  Synthetic Sequence
acacgtaaat

SEQ ID NO: 1500 - DNA, 10 bp, Artificial Sequence
  Synthetic Sequence
aatgtcacat

SEQ ID NO: 1501 - DNA, 10 bp, Artificial Sequence
  Synthetic Sequence
gtcctagcag

SEQ ID NO: 1502 - DNA, 10 bp, Artificial Sequence
  Synthetic Sequence
cgtccaaacg

SEQ ID NO: 1503 - DNA, 10 bp, Artificial Sequence
  Synthetic Sequence
acgacccagt

SEQ ID NO: 1504 - DNA, 10 bp, Artificial Sequence
  Synthetic Sequence
ccatatatta

SEQ ID NO: 1505 - DNA, 10 bp, Artificial Sequence
  Synthetic Sequence
atccttccga

SEQ ID NO: 1506 - DNA, 10 bp, Artificial Sequence
  Synthetic Sequence
tatgaccgcg

SEQ ID NO: 1507 - DNA, 10 bp, Artificial Sequence
  Synthetic Sequence
attgagggtg

SEQ ID NO: 1508 - DNA, 10 bp, Artificial Sequence
  Synthetic Sequence
cattaactag

SEQ ID NO: 1509 - DNA, 10 bp, Artificial Sequence
  Synthetic Sequence
tactcctgcc

SEQ ID NO: 1510 - DNA, 10 bp, Artificial Sequence
  Synthetic Sequence
ttgacaacct

SEQ ID NO: 1511 - DNA, 10 bp, Artificial Sequence
  Synthetic Sequence
gatttcgact

SEQ ID NO: 1512 - DNA, 10 bp, Artificial Sequence
  Synthetic Sequence
ttagcacaat

SEQ ID NO: 1513 - DNA, 10 bp, Artificial Sequence
  Synthetic Sequence
gttcgctttg

SEQ ID NO: 1514 - DNA, 10 bp, Artificial Sequence
  Synthetic Sequence
ttgcaactgg

SEQ ID NO: 1515 - DNA, 10 bp, Artificial Sequence
  Synthetic Sequence
aattgccatt

SEQ ID NO: 1516 - DNA, 10 bp, Artificial Sequence
  Synthetic Sequence
cgccttccag

SEQ ID NO: 1517 - DNA, 10 bp, Artificial Sequence
  Synthetic Sequence
tgatgagctg

SEQ ID NO: 1518 - DNA, 10 bp, Artificial Sequence
  Synthetic Sequence
ccaccattta

SEQ ID NO: 1519 - DNA, 10 bp, Artificial Sequence
  Synthetic Sequence
ataatggcag

SEQ ID NO: 1520 - DNA, 10 bp, Artificial Sequence
  Synthetic Sequence
ctattccggt

SEQ ID NO: 1521 - DNA, 10 bp, Artificial Sequence
  Synthetic Sequence
tcgagtggcg

SEQ ID NO: 1522 - DNA, 10 bp, Artificial Sequence
  Synthetic Sequence
gcttataaca

SEQ ID NO: 1523 - DNA, 10 bp, Artificial Sequence
  Synthetic Sequence
taaatactaa

SEQ ID NO: 1524 - DNA, 10 bp, Artificial Sequence
  Synthetic Sequence
tcgttcaagc

SEQ ID NO: 1525 - DNA, 10 bp, Artificial Sequence
  Synthetic Sequence
gcagccctaa

SEQ ID NO: 1526 - DNA, 10 bp, Artificial Sequence
  Synthetic Sequence
acgggagcat

SEQ ID NO: 1527 - DNA, 10 bp, Artificial Sequence
  Synthetic Sequence
atagcagctc

SEQ ID NO: 1528 - DNA, 10 bp, Artificial Sequence
  Synthetic Sequence
acacttatag

SEQ ID NO: 1529 - DNA, 10 bp, Artificial Sequence
  Synthetic Sequence
gaggaggtat

SEQ ID NO: 1530 - DNA, 10 bp, Artificial Sequence
  Synthetic Sequence
gttgctccag

SEQ ID NO: 1531 - DNA, 10 bp, Artificial Sequence
  Synthetic Sequence
tgaggatact

SEQ ID NO: 1532 - DNA, 10 bp, Artificial Sequence
  Synthetic Sequence
caccataatt

SEQ ID NO: 1533 - DNA, 10 bp, Artificial Sequence
  Synthetic Sequence
actcgagagc

SEQ ID NO: 1534 - DNA, 10 bp, Artificial Sequence
  Synthetic Sequence
acagcccacc

SEQ ID NO: 1535 - DNA, 10 bp, Artificial Sequence
  Synthetic Sequence
gatacaaccc

SEQ ID NO: 1536 - DNA, 10 bp, Artificial Sequence
  Synthetic Sequence
tttggcggtt

SEQ ID NO: 1537 - DNA, 10 bp, Artificial Sequence
  Synthetic Sequence
ggtccattgg

SEQ ID NO: 1538 - DNA, 10 bp, Artificial Sequence
  Synthetic Sequence
ctccgatatc

SEQ ID NO: 1539 - DNA, 10 bp, Artificial Sequence
  Synthetic Sequence
atcgaccctt

SEQ ID NO: 1540 - DNA, 10 bp, Artificial Sequence
  Synthetic Sequence
aaagcttcgt

SEQ ID NO: 1541 - DNA, 10 bp, Artificial Sequence
  Synthetic Sequence
cctattgccc

SEQ ID NO: 1542 - DNA, 10 bp, Artificial Sequence
  Synthetic Sequence
aactacgctg

SEQ ID NO: 1543 - DNA, 10 bp, Artificial Sequence
  Synthetic Sequence
cttagtatgt

SEQ ID NO: 1544 - DNA, 10 bp, Artificial Sequence
  Synthetic Sequence
aatgtctccc

SEQ ID NO: 1545 - DNA, 10 bp, Artificial Sequence
  Synthetic Sequence
tcttatgtca

SEQ ID NO: 1546 - DNA, 10 bp, Artificial Sequence
  Synthetic Sequence
ttcccgaccg

SEQ ID NO: 1547 - DNA, 10 bp, Artificial Sequence
  Synthetic Sequence
gctctcgttg

SEQ ID NO: 1548 - DNA, 10 bp, Artificial Sequence
  Synthetic Sequence
ctaatgccgg

SEQ ID NO: 1549 - DNA, 10 bp, Artificial Sequence
  Synthetic Sequence
cccaaggacg

SEQ ID NO: 1550 - DNA, 10 bp, Artificial Sequence
  Synthetic Sequence
tgctcagctc

SEQ ID NO: 1551 - DNA, 10 bp, Artificial Sequence
  Synthetic Sequence
gttggcgatg

SEQ ID NO: 1552 - DNA, 10 bp, Artificial Sequence
  Synthetic Sequence
gtctttaact

SEQ ID NO: 1553 - DNA, 10 bp, Artificial Sequence
  Synthetic Sequence
gcggttcgat

SEQ ID NO: 1554 - DNA, 10 bp, Artificial Sequence
  Synthetic Sequence
agtccggaca

SEQ ID NO: 1555 - DNA, 10 bp, Artificial Sequence
  Synthetic Sequence
agcatggacc

SEQ ID NO: 1556 - DNA, 10 bp, Artificial Sequence
  Synthetic Sequence
ctgtgcttag

SEQ ID NO: 1557 - DNA, 10 bp, Artificial Sequence
  Synthetic Sequence
tgaacgaagc

SEQ ID NO: 1558 - DNA, 10 bp, Artificial Sequence
  Synthetic Sequence
acagatccgt

SEQ ID NO: 1559 - DNA, 10 bp, Artificial Sequence
  Synthetic Sequence
aacggcccta

SEQ ID NO: 1560 - DNA, 10 bp, Artificial Sequence
  Synthetic Sequence
caagatgctc

SEQ ID NO: 1561 - DNA, 10 bp, Artificial Sequence
  Synthetic Sequence
gcacgttgtt

SEQ ID NO: 1562 - DNA, 10 bp, Artificial Sequence
  Synthetic Sequence
gctagacagg

SEQ ID NO: 1563 - DNA, 10 bp, Artificial Sequence
  Synthetic Sequence
cctagtgttg

SEQ ID NO: 1564 - DNA, 10 bp, Artificial Sequence
  Synthetic Sequence
ttctctggcc

SEQ ID NO: 1565 - DNA, 10 bp, Artificial Sequence
  Synthetic Sequence
gtacagttgg

SEQ ID NO: 1566 - DNA, 10 bp, Artificial Sequence
  Synthetic Sequence
ctcagtctac

SEQ ID NO: 1567 - DNA, 10 bp, Artificial Sequence
  Synthetic Sequence
tcactatggc

SEQ ID NO: 1568 - DNA, 10 bp, Artificial Sequence
  Synthetic Sequence
gcagggagtc

SEQ ID NO: 1569 - DNA, 10 bp, Artificial Sequence
  Synthetic Sequence
aagacgttcc

SEQ ID NO: 1570 - DNA, 10 bp, Artificial Sequence
  Synthetic Sequence
aaccctccgc

SEQ ID NO: 1571 - DNA, 10 bp, Artificial Sequence
  Synthetic Sequence
gttagtcgcc

SEQ ID NO: 1572 - DNA, 10 bp, Artificial Sequence
  Synthetic Sequence
tgactagcgc

SEQ ID NO: 1573 - DNA, 10 bp, Artificial Sequence
  Synthetic Sequence
atacgcaatc

SEQ ID NO: 1574 - DNA, 10 bp, Artificial Sequence
  Synthetic Sequence
gaagattcgg

SEQ ID NO: 1575 - DNA, 10 bp, Artificial Sequence
  Synthetic Sequence
cgttcgcgag

SEQ ID NO: 1576 - DNA, 10 bp, Artificial Sequence
  Synthetic Sequence
ggtacccact

SEQ ID NO: 1577 - DNA, 10 bp, Artificial Sequence
  Synthetic Sequence
ccagtactgc

SEQ ID NO: 1578 - DNA, 10 bp, Artificial Sequence
  Synthetic Sequence
gttgtatcag

SEQ ID NO: 1579 - DNA, 10 bp, Artificial Sequence
  Synthetic Sequence
acgccaagcg

SEQ ID NO: 1580 - DNA, 10 bp, Artificial Sequence
  Synthetic Sequence
tatctggcag

SEQ ID NO: 1581 - DNA, 10 bp, Artificial Sequence
  Synthetic Sequence
atgatgccgc

SEQ ID NO: 1582 - DNA, 10 bp, Artificial Sequence
  Synthetic Sequence
tccagattcg

SEQ ID NO: 1583 - DNA, 10 bp, Artificial Sequence
  Synthetic Sequence
aacaagcacc

SEQ ID NO: 1584 - DNA, 10 bp, Artificial Sequence
  Synthetic Sequence
ctcgccgtga

SEQ ID NO: 1585 - DNA, 10 bp, Artificial Sequence
  Synthetic Sequence
aaatcgccga

SEQ ID NO: 1586 - DNA, 10 bp, Artificial Sequence
  Synthetic Sequence
aattagccac

SEQ ID NO: 1587 - DNA, 10 bp, Artificial Sequence
  Synthetic Sequence
cctcacgcct

SEQ ID NO: 1588 - DNA, 10 bp, Artificial Sequence
  Synthetic Sequence
ccgaccgcat

SEQ ID NO: 1589 - DNA, 10 bp, Artificial Sequence
  Synthetic Sequence
gtctggcatc

SEQ ID NO: 1590 - DNA, 10 bp, Artificial Sequence
  Synthetic Sequence
actggccaat

SEQ ID NO: 1591 - DNA, 10 bp, Artificial Sequence
  Synthetic Sequence
aatgagctca

SEQ ID NO: 1592 - DNA, 10 bp, Artificial Sequence
  Synthetic Sequence
gcctgcgttt

SEQ ID NO: 1593 - DNA, 10 bp, Artificial Sequence
  Synthetic Sequence
gcattgtagg

SEQ ID NO: 1594 - DNA, 10 bp, Artificial Sequence
  Synthetic Sequence
ctgatgttgt

SEQ ID NO: 1595 - DNA, 10 bp, Artificial Sequence
  Synthetic Sequence
cgactgttcc

SEQ ID NO: 1596 - DNA, 10 bp, Artificial Sequence
  Synthetic Sequence
acgtagttat

SEQ ID NO: 1597 - DNA, 10 bp, Artificial Sequence
  Synthetic Sequence
atcctcgtct

SEQ ID NO: 1598 - DNA, 10 bp, Artificial Sequence
  Synthetic Sequence
catggctgat

SEQ ID NO: 1599 - DNA, 10 bp, Artificial Sequence
  Synthetic Sequence
agatcttagc

SEQ ID NO: 1600 - DNA, 10 bp, Artificial Sequence
  Synthetic Sequence
ctcacgtgaa

SEQ ID NO: 1601 - DNA, 10 bp, Artificial Sequence
  Synthetic Sequence
tgaatgttga

SEQ ID NO: 1602 - DNA, 10 bp, Artificial Sequence
  Synthetic Sequence
ccttccgttg

SEQ ID NO: 1603 - DNA, 10 bp, Artificial Sequence
  Synthetic Sequence
ttacccaaag

SEQ ID NO: 1604 - DNA, 10 bp, Artificial Sequence
  Synthetic Sequence
ttcgcttaat

SEQ ID NO: 1605 - DNA, 10 bp, Artificial Sequence
  Synthetic Sequence
cgaaacagcc

SEQ ID NO: 1606 - DNA, 10 bp, Artificial Sequence
  Synthetic Sequence
agttactaca

SEQ ID NO: 1607 - DNA, 10 bp, Artificial Sequence
  Synthetic Sequence
ttcgtttcag

SEQ ID NO: 1608 - DNA, 10 bp, Artificial Sequence
  Synthetic Sequence
cacgctgtgt

SEQ ID NO: 1609 - DNA, 10 bp, Artificial Sequence
  Synthetic Sequence
aggcctgctc

SEQ ID NO: 1610 - DNA, 10 bp, Artificial Sequence
  Synthetic Sequence
tgcacgtagg

SEQ ID NO: 1611 - DNA, 10 bp, Artificial Sequence
  Synthetic Sequence
tagtttcagt

SEQ ID NO: 1612 - DNA, 10 bp, Artificial Sequence
  Synthetic Sequence
gtaaggattt

SEQ ID NO: 1613 - DNA, 10 bp, Artificial Sequence
  Synthetic Sequence
tcatgtggac

SEQ ID NO: 1614 - DNA, 10 bp, Artificial Sequence
  Synthetic Sequence
cctcgagttc

SEQ ID NO: 1615 - DNA, 10 bp, Artificial Sequence
  Synthetic Sequence
ggtctacggc

SEQ ID NO: 1616 - DNA, 10 bp, Artificial Sequence
  Synthetic Sequence
ttccttgaaa

SEQ ID NO: 1617 - DNA, 10 bp, Artificial Sequence
  Synthetic Sequence
cgtcttaacc

SEQ ID NO: 1618 - DNA, 10 bp, Artificial Sequence
  Synthetic Sequence
ctaataacaa

SEQ ID NO: 1619 - DNA, 10 bp, Artificial Sequence
  Synthetic Sequence
cgaagacatg

SEQ ID NO: 1620 - DNA, 10 bp, Artificial Sequence
  Synthetic Sequence
agccgtgctg

SEQ ID NO: 1621 - DNA, 10 bp, Artificial Sequence
  Synthetic Sequence
ctgtaggaac

SEQ ID NO: 1622 - DNA, 10 bp, Artificial Sequence
  Synthetic Sequence
cgtaaggcag

SEQ ID NO: 1623 - DNA, 10 bp, Artificial Sequence
  Synthetic Sequence
gatgtggaga

SEQ ID NO: 1624 - DNA, 10 bp, Artificial Sequence
  Synthetic Sequence
cgaacatagg

SEQ ID NO: 1625 - DNA, 10 bp, Artificial Sequence
  Synthetic Sequence
tcaataaagt

SEQ ID NO: 1626 - DNA, 10 bp, Artificial Sequence
  Synthetic Sequence
gtgtatcagc

SEQ ID NO: 1627 - DNA, 10 bp, Artificial Sequence
  Synthetic Sequence
cgccagacat

SEQ ID NO: 1628 - DNA, 10 bp, Artificial Sequence
  Synthetic Sequence
gtaatgaggt

SEQ ID NO: 1629 - DNA, 10 bp, Artificial Sequence
  Synthetic Sequence
acaaacgcac

SEQ ID NO: 1630 - DNA, 10 bp, Artificial Sequence
  Synthetic Sequence
tcgctgcaca

SEQ ID NO: 1631 - DNA, 10 bp, Artificial Sequence
  Synthetic Sequence
acaatttggc

SEQ ID NO: 1632 - DNA, 10 bp, Artificial Sequence
  Synthetic Sequence
agatctgcaa

SEQ ID NO: 1633 - DNA, 10 bp, Artificial Sequence
  Synthetic Sequence
cgtatgtgcc

SEQ ID NO: 1634 - DNA, 10 bp, Artificial Sequence
  Synthetic Sequence
acagcgaggt

SEQ ID NO: 1635 - DNA, 10 bp, Artificial Sequence
  Synthetic Sequence
ctgttagtta

SEQ ID NO: 1636 - DNA, 10 bp, Artificial Sequence
  Synthetic Sequence
gtgcacttta

SEQ ID NO: 1637 - DNA, 10 bp, Artificial Sequence
  Synthetic Sequence
gttaggtggg

SEQ ID NO: 1638 - DNA, 10 bp, Artificial Sequence
  Synthetic Sequence
gcctccctct

SEQ ID NO: 1639 - DNA, 10 bp, Artificial Sequence
  Synthetic Sequence
gggttaacat

SEQ ID NO: 1640 - DNA, 10 bp, Artificial Sequence
  Synthetic Sequence
ttcatagcgg

SEQ ID NO: 1641 - DNA, 10 bp, Artificial Sequence
  Synthetic Sequence
aataactaaa

SEQ ID NO: 1642 - DNA, 10 bp, Artificial Sequence
  Synthetic Sequence
caagtggaag

SEQ ID NO: 1643 - DNA, 10 bp, Artificial Sequence
  Synthetic Sequence
ctgacgactg

SEQ ID NO: 1644 - DNA, 10 bp, Artificial Sequence
  Synthetic Sequence
ataatgcaca

SEQ ID NO: 1645 - DNA, 10 bp, Artificial Sequence
  Synthetic Sequence
cctccacctg

SEQ ID NO: 1646 - DNA, 10 bp, Artificial Sequence
  Synthetic Sequence
gtctaggaga

SEQ ID NO: 1647 - DNA, 10 bp, Artificial Sequence
  Synthetic Sequence
gtagcactca

SEQ ID NO: 1648 - DNA, 10 bp, Artificial Sequence
  Synthetic Sequence
tctccgtgtg

SEQ ID NO: 1649 - DNA, 10 bp, Artificial Sequence
  Synthetic Sequence
tatgggtcgg

SEQ ID NO: 1650 - DNA, 10 bp, Artificial Sequence
  Synthetic Sequence
attctctggt

SEQ ID NO: 1651 - DNA, 10 bp, Artificial Sequence
  Synthetic Sequence
ccctgccact

SEQ ID NO: 1652 - DNA, 10 bp, Artificial Sequence
  Synthetic Sequence
tcggatcaga

SEQ ID NO: 1653 - DNA, 10 bp, Artificial Sequence
  Synthetic Sequence
gccaaagtac

SEQ ID NO: 1654 - DNA, 10 bp, Artificial Sequence
  Synthetic Sequence
ccgtttcata

SEQ ID NO: 1655 - DNA, 10 bp, Artificial Sequence
  Synthetic Sequence
tgctggttga

SEQ ID NO: 1656 - DNA, 10 bp, Artificial Sequence
  Synthetic Sequence
ggctgtagta

SEQ ID NO: 1657 - DNA, 10 bp, Artificial Sequence
  Synthetic Sequence
cagtgctagc

SEQ ID NO: 1658 - DNA, 10 bp, Artificial Sequence
  Synthetic Sequence
ataggtctgc

SEQ ID NO: 1659 - DNA, 10 bp, Artificial Sequence
  Synthetic Sequence
ataactggaa

SEQ ID NO: 1660 - DNA, 10 bp, Artificial Sequence
  Synthetic Sequence
ccacaagaat

SEQ ID NO: 1661 - DNA, 10 bp, Artificial Sequence
  Synthetic Sequence
atgtagccga

SEQ ID NO: 1662 - DNA, 10 bp, Artificial Sequence
  Synthetic Sequence
gagaactggg

SEQ ID NO: 1663 - DNA, 10 bp, Artificial Sequence
  Synthetic Sequence
agaatgtact

SEQ ID NO: 1664 - DNA, 10 bp, Artificial Sequence
  Synthetic Sequence
caggttgtgc

SEQ ID NO: 1665 - DNA, 10 bp, Artificial Sequence
  Synthetic Sequence
tatgatccgg

SEQ ID NO: 1666 - DNA, 10 bp, Artificial Sequence
  Synthetic Sequence
aaattcggct

SEQ ID NO: 1667 - DNA, 10 bp, Artificial Sequence
  Synthetic Sequence
gtgaaagtta

SEQ ID NO: 1668 - DNA, 10 bp, Artificial Sequence
  Synthetic Sequence
gtccaggaac

SEQ ID NO: 1669 - DNA, 10 bp, Artificial Sequence
  Synthetic Sequence
ggataatggt

SEQ ID NO: 1670 - DNA, 10 bp, Artificial Sequence
  Synthetic Sequence
gtctctgttc

SEQ ID NO: 1671 - DNA, 10 bp, Artificial Sequence
  Synthetic Sequence
ctaccgaaat

SEQ ID NO: 1672 - DNA, 10 bp, Artificial Sequence
  Synthetic Sequence
cgttgtgctt

SEQ ID NO: 1673 - DNA, 10 bp, Artificial Sequence
  Synthetic Sequence
ggtctcccaa

SEQ ID NO: 1674 - DNA, 10 bp, Artificial Sequence
  Synthetic Sequence
actagtatgg

SEQ ID NO: 1675 - DNA, 10 bp, Artificial Sequence
  Synthetic Sequence
acgtggttcc

SEQ ID NO: 1676 - DNA, 10 bp, Artificial Sequence
  Synthetic Sequence
gccatgctaa

SEQ ID NO: 1677 - DNA, 10 bp, Artificial Sequence
  Synthetic Sequence
ccagcggcta

SEQ ID NO: 1678 - DNA, 10 bp, Artificial Sequence
  Synthetic Sequence
gattatactg

SEQ ID NO: 1679 - DNA, 10 bp, Artificial Sequence
  Synthetic Sequence
tcgtggctgg

SEQ ID NO: 1680 - DNA, 10 bp, Artificial Sequence
  Synthetic Sequence
tctgaacggg

SEQ ID NO: 1681 - DNA, 10 bp, Artificial Sequence
  Synthetic Sequence
agggtataca

SEQ ID NO: 1682 - DNA, 10 bp, Artificial Sequence
  Synthetic Sequence
gctgtattac

SEQ ID NO: 1683 - DNA, 10 bp, Artificial Sequence
  Synthetic Sequence
ggatcacgac

SEQ ID NO: 1684 - DNA, 10 bp, Artificial Sequence
  Synthetic Sequence
cacgccttag

SEQ ID NO: 1685 - DNA, 10 bp, Artificial Sequence
  Synthetic Sequence
gccgtttagg

SEQ ID NO: 1686 - DNA, 10 bp, Artificial Sequence
  Synthetic Sequence
gctgcctaaa

SEQ ID NO: 1687 - DNA, 10 bp, Artificial Sequence
  Synthetic Sequence
gtttatagtt

SEQ ID NO: 1688 - DNA, 10 bp, Artificial Sequence
  Synthetic Sequence
agtaggcaac

SEQ ID NO: 1689 - DNA, 10 bp, Artificial Sequence
  Synthetic Sequence
tggtggagag

SEQ ID NO: 1690 - DNA, 10 bp, Artificial Sequence
  Synthetic Sequence
cttgaactgg

SEQ ID NO: 1691 - DNA, 10 bp, Artificial Sequence
  Synthetic Sequence
actcaacatg

SEQ ID NO: 1692 - DNA, 10 bp, Artificial Sequence
  Synthetic Sequence
gtagatgcgc

SEQ ID NO: 1693 - DNA, 10 bp, Artificial Sequence
  Synthetic Sequence
ccacgtgcgt

SEQ ID NO: 1694 - DNA, 10 bp, Artificial Sequence
  Synthetic Sequence
tatgtgcagg

SEQ ID NO: 1695 - DNA, 10 bp, Artificial Sequence
  Synthetic Sequence
gcccacataa

SEQ ID NO: 1696 - DNA, 10 bp, Artificial Sequence
  Synthetic Sequence
agatttcaag

SEQ ID NO: 1697 - DNA, 10 bp, Artificial Sequence
  Synthetic Sequence
acccgatcgg

SEQ ID NO: 1698 - DNA, 10 bp, Artificial Sequence
  Synthetic Sequence
cgtgagagtc

SEQ ID NO: 1699 - DNA, 10 bp, Artificial Sequence
  Synthetic Sequence
gcgtgtgtgt

SEQ ID NO: 1700 - DNA, 10 bp, Artificial Sequence
  Synthetic Sequence
ttactcctcc

SEQ ID NO: 1701 - DNA, 10 bp, Artificial Sequence
  Synthetic Sequence
gaacctagcg

SEQ ID NO: 1702 - DNA, 10 bp, Artificial Sequence
  Synthetic Sequence
aacgcgacga

SEQ ID NO: 1703 - DNA, 10 bp, Artificial Sequence
  Synthetic Sequence
acgtgggact

SEQ ID NO: 1704 - DNA, 10 bp, Artificial Sequence
  Synthetic Sequence
atacctaatg

SEQ ID NO: 1705 - DNA, 10 bp, Artificial Sequence
  Synthetic Sequence
catcccttcc

SEQ ID NO: 1706 - DNA, 10 bp, Artificial Sequence
  Synthetic Sequence
atgtttcctt

SEQ ID NO: 1707 - DNA, 10 bp, Artificial Sequence
  Synthetic Sequence
gagcactaac

SEQ ID NO: 1708 - DNA, 10 bp, Artificial Sequence
  Synthetic Sequence
ttagaatgat

SEQ ID NO: 1709 - DNA, 10 bp, Artificial Sequence
  Synthetic Sequence
tgtgcatcac

SEQ ID NO: 1710 - DNA, 10 bp, Artificial Sequence
  Synthetic Sequence
cgaactccgc

SEQ ID NO: 1711 - DNA, 10 bp, Artificial Sequence
  Synthetic Sequence
agtattcgca

SEQ ID NO: 1712 - DNA, 10 bp, Artificial Sequence
  Synthetic Sequence
ggagtccaca

SEQ ID NO: 1713 - DNA, 10 bp, Artificial Sequence
  Synthetic Sequence
gagtagtgtt

SEQ ID NO: 1714 - DNA, 10 bp, Artificial Sequence
  Synthetic Sequence
taaccgtagg

SEQ ID NO: 1715 - DNA, 10 bp, Artificial Sequence
  Synthetic Sequence
gcattctgtt

SEQ ID NO: 1716 - DNA, 10 bp, Artificial Sequence
  Synthetic Sequence
aagtagaaca

SEQ ID NO: 1717 - DNA, 10 bp, Artificial Sequence
  Synthetic Sequence
aatcgcgaaa

SEQ ID NO: 1718 - DNA, 10 bp, Artificial Sequence
  Synthetic Sequence
ggttgcgatt

SEQ ID NO: 1719 - DNA, 10 bp, Artificial Sequence
  Synthetic Sequence
tgtaaatgtg

SEQ ID NO: 1720 - DNA, 10 bp, Artificial Sequence
  Synthetic Sequence
tgcagtgacc

SEQ ID NO: 1721 - DNA, 10 bp, Artificial Sequence
  Synthetic Sequence
gctccgaggt

SEQ ID NO: 1722 - DNA, 10 bp, Artificial Sequence
  Synthetic Sequence
tgttatatta

SEQ ID NO: 1723 - DNA, 10 bp, Artificial Sequence
  Synthetic Sequence
gactctgtaa

SEQ ID NO: 1724 - DNA, 10 bp, Artificial Sequence
  Synthetic Sequence
acgtatcgcc

SEQ ID NO: 1725 - DNA, 10 bp, Artificial Sequence
  Synthetic Sequence
gattagtgaa

SEQ ID NO: 1726 - DNA, 10 bp, Artificial Sequence
  Synthetic Sequence
gacgggagca

SEQ ID NO: 1727 - DNA, 10 bp, Artificial Sequence
  Synthetic Sequence
gccatcaggt

SEQ ID NO: 1728 - DNA, 10 bp, Artificial Sequence
  Synthetic Sequence
ggagcgacag

SEQ ID NO: 1729 - DNA, 10 bp, Artificial Sequence
  Synthetic Sequence
tgatccggga

SEQ ID NO: 1730 - DNA, 10 bp, Artificial Sequence
  Synthetic Sequence
ggatccatac

SEQ ID NO: 1731 - DNA, 10 bp, Artificial Sequence
  Synthetic Sequence
cacatcttcg

SEQ ID NO: 1732 - DNA, 10 bp, Artificial Sequence
  Synthetic Sequence
cctcagggac

SEQ ID NO: 1733 - DNA, 10 bp, Artificial Sequence
  Synthetic Sequence
tcccacgtga

SEQ ID NO: 1734 - DNA, 10 bp, Artificial Sequence
  Synthetic Sequence
ccggtacacg

SEQ ID NO: 1735 - DNA, 10 bp, Artificial Sequence
  Synthetic Sequence
atttcaggta

SEQ ID NO: 1736 - DNA, 10 bp, Artificial Sequence
  Synthetic Sequence
attggttgcg

SEQ ID NO: 1737 - DNA, 10 bp, Artificial Sequence
  Synthetic Sequence
aagggtacag

SEQ ID NO: 1738 - DNA, 10 bp, Artificial Sequence
  Synthetic Sequence
ggcgactttc

SEQ ID NO: 1739 - DNA, 10 bp, Artificial Sequence
  Synthetic Sequence
gtaatagtca

SEQ ID NO: 1740 - DNA, 10 bp, Artificial Sequence
  Synthetic Sequence
attatggtta

SEQ ID NO: 1741 - DNA, 10 bp, Artificial Sequence
  Synthetic Sequence
aacgccacct

SEQ ID NO: 1742 - DNA, 10 bp, Artificial Sequence
  Synthetic Sequence
taggctaaac

SEQ ID NO: 1743 - DNA, 10 bp, Artificial Sequence
  Synthetic Sequence
gaaacccaca

SEQ ID NO: 1744 - DNA, 10 bp, Artificial Sequence
  Synthetic Sequence
cgagtaggcg

SEQ ID NO: 1745 - DNA, 10 bp, Artificial Sequence
  Synthetic Sequence
atgggccaga

SEQ ID NO: 1746 - DNA, 10 bp, Artificial Sequence
  Synthetic Sequence
cgtcctggag

SEQ ID NO: 1747 - DNA, 10 bp, Artificial Sequence
  Synthetic Sequence
ctttagcgcg

SEQ ID NO: 1748 - DNA, 10 bp, Artificial Sequence
  Synthetic Sequence
cggcatctca

SEQ ID NO: 1749 - DNA, 10 bp, Artificial Sequence
  Synthetic Sequence
aaagctccta

SEQ ID NO: 1750 - DNA, 10 bp, Artificial Sequence
  Synthetic Sequence
tctcgttgtc

SEQ ID NO: 1751 - DNA, 10 bp, Artificial Sequence
  Synthetic Sequence
aacccgccag

SEQ ID NO: 1752 - DNA, 10 bp, Artificial Sequence
  Synthetic Sequence
tatcatatca

SEQ ID NO: 1753 - DNA, 10 bp, Artificial Sequence
  Synthetic Sequence
tcgagttcat

SEQ ID NO: 1754 - DNA, 10 bp, Artificial Sequence
  Synthetic Sequence
aatcgaggtg

SEQ ID NO: 1755 - DNA, 10 bp, Artificial Sequence
  Synthetic Sequence
attgcataac

SEQ ID NO: 1756 - DNA, 10 bp, Artificial Sequence
  Synthetic Sequence
tcaagatatg

SEQ ID NO: 1757 - DNA, 10 bp, Artificial Sequence
  Synthetic Sequence
ttgtgtgcgg

SEQ ID NO: 1758 - DNA, 10 bp, Artificial Sequence
  Synthetic Sequence
gacactcatc

SEQ ID NO: 1759 - DNA, 10 bp, Artificial Sequence
  Synthetic Sequence
tggcaccata

SEQ ID NO: 1760 - DNA, 10 bp, Artificial Sequence
  Synthetic Sequence
ggacgtcaag

SEQ ID NO: 1761 - DNA, 10 bp, Artificial Sequence
  Synthetic Sequence
gagtaagaat

SEQ ID NO: 1762 - DNA, 10 bp, Artificial Sequence
  Synthetic Sequence
tgctaaacgc

SEQ ID NO: 1763 - DNA, 10 bp, Artificial Sequence
  Synthetic Sequence
cgcacgctaa

SEQ ID NO: 1764 - DNA, 10 bp, Artificial Sequence
  Synthetic Sequence
cccactctag

SEQ ID NO: 1765 - DNA, 10 bp, Artificial Sequence
  Synthetic Sequence
cgttgatact

SEQ ID NO: 1766 - DNA, 10 bp, Artificial Sequence
  Synthetic Sequence
aattaacgca

SEQ ID NO: 1767 - DNA, 10 bp, Artificial Sequence
  Synthetic Sequence
aagatagagc

SEQ ID NO: 1768 - DNA, 10 bp, Artificial Sequence
  Synthetic Sequence
gctctttatc

SEQ ID NO: 1769 - DNA, 10 bp, Artificial Sequence
  Synthetic Sequence
gagaccagag

SEQ ID NO: 1770 - DNA, 10 bp, Artificial Sequence
  Synthetic Sequence
gcgccgcttt

SEQ ID NO: 1771 - DNA, 10 bp, Artificial Sequence
  Synthetic Sequence
acttaagtta

SEQ ID NO: 1772 - DNA, 10 bp, Artificial Sequence
  Synthetic Sequence
cacacaattc

SEQ ID NO: 1773 - DNA, 10 bp, Artificial Sequence
  Synthetic Sequence
tacgcccagc

SEQ ID NO: 1774 - DNA, 10 bp, Artificial Sequence
  Synthetic Sequence
ctgacttgcc

SEQ ID NO: 1775 - DNA, 10 bp, Artificial Sequence
  Synthetic Sequence
aatcggtata

SEQ ID NO: 1776 - DNA, 10 bp, Artificial Sequence
  Synthetic Sequence
catacgcccg

SEQ ID NO: 1777 - DNA, 10 bp, Artificial Sequence
  Synthetic Sequence
attcaactgc

SEQ ID NO: 1778 - DNA, 10 bp, Artificial Sequence
  Synthetic Sequence
atatcagtat

SEQ ID NO: 1779 - DNA, 10 bp, Artificial Sequence
  Synthetic Sequence
tcggtattcc

SEQ ID NO: 1780 - DNA, 10 bp, Artificial Sequence
  Synthetic Sequence
tcgcaaactc

SEQ ID NO: 1781 - DNA, 10 bp, Artificial Sequence
  Synthetic Sequence
ctagctggtc

SEQ ID NO: 1782 - DNA, 10 bp, Artificial Sequence
  Synthetic Sequence
tcgagtctgt

SEQ ID NO: 1783 - DNA, 10 bp, Artificial Sequence
  Synthetic Sequence
agctaggctt

SEQ ID NO: 1784 - DNA, 10 bp, Artificial Sequence
  Synthetic Sequence
gtggatccct

SEQ ID NO: 1785 - DNA, 10 bp, Artificial Sequence
  Synthetic Sequence
cagaacggtg

SEQ ID NO: 1786 - DNA, 10 bp, Artificial Sequence
  Synthetic Sequence
agtgtggcgg

SEQ ID NO: 1787 - DNA, 10 bp, Artificial Sequence
  Synthetic Sequence
aaagacttac

SEQ ID NO: 1788 - DNA, 10 bp, Artificial Sequence
  Synthetic Sequence
tctatgagct

SEQ ID NO: 1789 - DNA, 10 bp, Artificial Sequence
  Synthetic Sequence
gcgtacggac

SEQ ID NO: 1790 - DNA, 10 bp, Artificial Sequence
  Synthetic Sequence
gctagttatg

SEQ ID NO: 1791 - DNA, 10 bp, Artificial Sequence
  Synthetic Sequence
aaggccaggg

SEQ ID NO: 1792 - DNA, 10 bp, Artificial Sequence
  Synthetic Sequence
acgttatcca

SEQ ID NO: 1793 - DNA, 10 bp, Artificial Sequence
  Synthetic Sequence
gcctcagaac

SEQ ID NO: 1794 - DNA, 10 bp, Artificial Sequence
  Synthetic Sequence
gttagtctag

SEQ ID NO: 1795 - DNA, 10 bp, Artificial Sequence
  Synthetic Sequence
cggttaacca

SEQ ID NO: 1796 - DNA, 10 bp, Artificial Sequence
  Synthetic Sequence
caatagaggt

SEQ ID NO: 1797 - DNA, 10 bp, Artificial Sequence
  Synthetic Sequence
cgcatagact

SEQ ID NO: 1798 - DNA, 10 bp, Artificial Sequence
  Synthetic Sequence
acagtaggga

SEQ ID NO: 1799 - DNA, 10 bp, Artificial Sequence
  Synthetic Sequence
cgtctaggga

SEQ ID NO: 1800 - DNA, 10 bp, Artificial Sequence
  Synthetic Sequence
caccgagcaa

SEQ ID NO: 1801 - DNA, 10 bp, Artificial Sequence
  Synthetic Sequence
cttattctaa

SEQ ID NO: 1802 - DNA, 10 bp, Artificial Sequence
  Synthetic Sequence
ggacgggaca

SEQ ID NO: 1803 - DNA, 10 bp, Artificial Sequence
  Synthetic Sequence
cggtacctta

SEQ ID NO: 1804 - DNA, 10 bp, Artificial Sequence
  Synthetic Sequence
ccttgcaaac

SEQ ID NO: 1805 - DNA, 10 bp, Artificial Sequence
  Synthetic Sequence
caaacctttg

SEQ ID NO: 1806 - DNA, 10 bp, Artificial Sequence
  Synthetic Sequence
tgggcttctt

SEQ ID NO: 1807 - DNA, 10 bp, Artificial Sequence
  Synthetic Sequence
tccctaagat

SEQ ID NO: 1808 - DNA, 10 bp, Artificial Sequence
  Synthetic Sequence
agatggtcac

SEQ ID NO: 1809 - DNA, 10 bp, Artificial Sequence
  Synthetic Sequence
aagagatctc

SEQ ID NO: 1810 - DNA, 10 bp, Artificial Sequence
  Synthetic Sequence
tttaatttgc

SEQ ID NO: 1811 - DNA, 10 bp, Artificial Sequence
  Synthetic Sequence
cacttgcgga

SEQ ID NO: 1812 - DNA, 10 bp, Artificial Sequence
  Synthetic Sequence
gtccggcctt

SEQ ID NO: 1813 - DNA, 10 bp, Artificial Sequence
  Synthetic Sequence
ggtagagttt

SEQ ID NO: 1814 - DNA, 10 bp, Artificial Sequence
  Synthetic Sequence
gcatcgtgcg

SEQ ID NO: 1815 - DNA, 10 bp, Artificial Sequence
  Synthetic Sequence
gtgggtctcc

SEQ ID NO: 1816 - DNA, 10 bp, Artificial Sequence
  Synthetic Sequence
atagacctct

SEQ ID NO: 1817 - DNA, 10 bp, Artificial Sequence
  Synthetic Sequence
ctggagtgac

SEQ ID NO: 1818 - DNA, 10 bp, Artificial Sequence
  Synthetic Sequence
tgtggaggtg

SEQ ID NO: 1819 - DNA, 10 bp, Artificial Sequence
  Synthetic Sequence
gggagaggga

SEQ ID NO: 1820 - DNA, 10 bp, Artificial Sequence
  Synthetic Sequence
tattgagcca

SEQ ID NO: 1821 - DNA, 10 bp, Artificial Sequence
  Synthetic Sequence
ctagagtccg

SEQ ID NO: 1822 - DNA, 10 bp, Artificial Sequence
  Synthetic Sequence
tcgttgtgca

SEQ ID NO: 1823 - DNA, 10 bp, Artificial Sequence
  Synthetic Sequence
aagacatccg

SEQ ID NO: 1824 - DNA, 10 bp, Artificial Sequence
  Synthetic Sequence
gggcgactgt

SEQ ID NO: 1825 - DNA, 10 bp, Artificial Sequence
  Synthetic Sequence
tagatacgga

SEQ ID NO: 1826 - DNA, 10 bp, Artificial Sequence
  Synthetic Sequence
atcgaaatga

SEQ ID NO: 1827 - DNA, 10 bp, Artificial Sequence
  Synthetic Sequence
gtaaaccgct

SEQ ID NO: 1828 - DNA, 10 bp, Artificial Sequence
  Synthetic Sequence
agttctttct

SEQ ID NO: 1829 - DNA, 10 bp, Artificial Sequence
  Synthetic Sequence
ttaattatcc

SEQ ID NO: 1830 - DNA, 10 bp, Artificial Sequence
  Synthetic Sequence
atatcaaacg

SEQ ID NO: 1831 - DNA, 10 bp, Artificial Sequence
  Synthetic Sequence
gcggactcga

SEQ ID NO: 1832 - DNA, 10 bp, Artificial Sequence
  Synthetic Sequence
accttatcgt

SEQ ID NO: 1833 - DNA, 10 bp, Artificial Sequence
  Synthetic Sequence
tgatggttcg

SEQ ID NO: 1834 - DNA, 10 bp, Artificial Sequence
  Synthetic Sequence
tgttgatcat

SEQ ID NO: 1835 - DNA, 10 bp, Artificial Sequence
  Synthetic Sequence
gacttgtaca

SEQ ID NO: 1836 - DNA, 10 bp, Artificial Sequence
  Synthetic Sequence
atatcacgtc

SEQ ID NO: 1837 - DNA, 10 bp, Artificial Sequence
  Synthetic Sequence
gggttcttgg

SEQ ID NO: 1838 - DNA, 10 bp, Artificial Sequence
  Synthetic Sequence
gcgcattact

SEQ ID NO: 1839 - DNA, 10 bp, Artificial Sequence
  Synthetic Sequence
tagtactgac

SEQ ID NO: 1840 - DNA, 10 bp, Artificial Sequence
  Synthetic Sequence
agctacgaac

SEQ ID NO: 1841 - DNA, 10 bp, Artificial Sequence
  Synthetic Sequence
aagactcatt

SEQ ID NO: 1842 - DNA, 10 bp, Artificial Sequence
  Synthetic Sequence
gatcctgtgg

SEQ ID NO: 1843 - DNA, 10 bp, Artificial Sequence
  Synthetic Sequence
tgcccaaagt

SEQ ID NO: 1844 - DNA, 10 bp, Artificial Sequence
  Synthetic Sequence
ctataaatcg

SEQ ID NO: 1845 - DNA, 10 bp, Artificial Sequence
  Synthetic Sequence
ttctctattg

SEQ ID NO: 1846 - DNA, 10 bp, Artificial Sequence
  Synthetic Sequence
acccaaacta

SEQ ID NO: 1847 - DNA, 10 bp, Artificial Sequence
  Synthetic Sequence
tgtgggccta

SEQ ID NO: 1848 - DNA, 10 bp, Artificial Sequence
  Synthetic Sequence
cgttacctcg

SEQ ID NO: 1849 - DNA, 10 bp, Artificial Sequence
  Synthetic Sequence
actaccaagg

SEQ ID NO: 1850 - DNA, 10 bp, Artificial Sequence
  Synthetic Sequence
gcaccatacg

SEQ ID NO: 1851 - DNA, 10 bp, Artificial Sequence
  Synthetic Sequence
cgcctatcac

SEQ ID NO: 1852 - DNA, 10 bp, Artificial Sequence
  Synthetic Sequence
gtagaagacg

SEQ ID NO: 1853 - DNA, 10 bp, Artificial Sequence
  Synthetic Sequence
aactgccacg

SEQ ID NO: 1854 - DNA, 10 bp, Artificial Sequence
  Synthetic Sequence
tagcgggtac

SEQ ID NO: 1855 - DNA, 10 bp, Artificial Sequence
  Synthetic Sequence
ctaagccgac

SEQ ID NO: 1856 - DNA, 10 bp, Artificial Sequence
  Synthetic Sequence
gcgttactca

SEQ ID NO: 1857 - DNA, 10 bp, Artificial Sequence
  Synthetic Sequence
ttcagataaa

SEQ ID NO: 1858 - DNA, 10 bp, Artificial Sequence
  Synthetic Sequence
aaataaatga

SEQ ID NO: 1859 - DNA, 10 bp, Artificial Sequence
  Synthetic Sequence
attggtacta

SEQ ID NO: 1860 - DNA, 10 bp, Artificial Sequence
  Synthetic Sequence
atgactactt

SEQ ID NO: 1861 - DNA, 10 bp, Artificial Sequence
  Synthetic Sequence
cgatgaggtc

SEQ ID NO: 1862 - DNA, 10 bp, Artificial Sequence
  Synthetic Sequence
ggctaaatag

SEQ ID NO: 1863 - DNA, 10 bp, Artificial Sequence
  Synthetic Sequence
ggacttagga

SEQ ID NO: 1864 - DNA, 10 bp, Artificial Sequence
  Synthetic Sequence
cttgtgttta

SEQ ID NO: 1865 - DNA, 10 bp, Artificial Sequence
  Synthetic Sequence
tagaggctca

SEQ ID NO: 1866 - DNA, 10 bp, Artificial Sequence
  Synthetic Sequence
gggcgtagac

SEQ ID NO: 1867 - DNA, 10 bp, Artificial Sequence
  Synthetic Sequence
ggtgtttaaa

SEQ ID NO: 1868 - DNA, 10 bp, Artificial Sequence
  Synthetic Sequence
ggatagtaca

SEQ ID NO: 1869 - DNA, 10 bp, Artificial Sequence
  Synthetic Sequence
ccaacttaaa

SEQ ID NO: 1870 - DNA, 10 bp, Artificial Sequence
  Synthetic Sequence
agccaccagt

SEQ ID NO: 1871 - DNA, 10 bp, Artificial Sequence
  Synthetic Sequence
gccacactcg

SEQ ID NO: 1872 - DNA, 10 bp, Artificial Sequence
  Synthetic Sequence
atagtcgccc

SEQ ID NO: 1873 - DNA, 10 bp, Artificial Sequence
  Synthetic Sequence
ttacctacca

SEQ ID NO: 1874 - DNA, 10 bp, Artificial Sequence
  Synthetic Sequence
ccacggtttg

SEQ ID NO: 1875 - DNA, 10 bp, Artificial Sequence
  Synthetic Sequence
taagttgaga

SEQ ID NO: 1876 - DNA, 10 bp, Artificial Sequence
  Synthetic Sequence
tcatccatag

SEQ ID NO: 1877 - DNA, 10 bp, Artificial Sequence
  Synthetic Sequence
gtgttgggac

SEQ ID NO: 1878 - DNA, 10 bp, Artificial Sequence
  Synthetic Sequence
caccttgggt

SEQ ID NO: 1879 - DNA, 10 bp, Artificial Sequence
  Synthetic Sequence
cgcagatagt

SEQ ID NO: 1880 - DNA, 10 bp, Artificial Sequence
  Synthetic Sequence
acaagttgtg

SEQ ID NO: 1881 - DNA, 10 bp, Artificial Sequence
  Synthetic Sequence
atgaatcctc

SEQ ID NO: 1882 - DNA, 10 bp, Artificial Sequence
  Synthetic Sequence
caaatgcggt

SEQ ID NO: 1883 - DNA, 10 bp, Artificial Sequence
  Synthetic Sequence
cactgccaac

SEQ ID NO: 1884 - DNA, 10 bp, Artificial Sequence
  Synthetic Sequence
cggctcatgt

SEQ ID NO: 1885 - DNA, 10 bp, Artificial Sequence
  Synthetic Sequence
cgacagcttt

SEQ ID NO: 1886 - DNA, 10 bp, Artificial Sequence
  Synthetic Sequence
accacgcgct

SEQ ID NO: 1887 - DNA, 10 bp, Artificial Sequence
  Synthetic Sequence
ctatttgcca

SEQ ID NO: 1888 - DNA, 10 bp, Artificial Sequence
  Synthetic Sequence
attgatgtta

SEQ ID NO: 1889 - DNA, 10 bp, Artificial Sequence
  Synthetic Sequence
actgatctag

SEQ ID NO: 1890 - DNA, 10 bp, Artificial Sequence
  Synthetic Sequence
ggccgtgtag

SEQ ID NO: 1891 - DNA, 10 bp, Artificial Sequence
  Synthetic Sequence
atgatgaacc

SEQ ID NO: 1892 - DNA, 10 bp, Artificial Sequence
  Synthetic Sequence
gtcgaaccgt

SEQ ID NO: 1893 - DNA, 10 bp, Artificial Sequence
  Synthetic Sequence
ttctgagttt

SEQ ID NO: 1894 - DNA, 10 bp, Artificial Sequence
  Synthetic Sequence
tagccaataa

SEQ ID NO: 1895 - DNA, 10 bp, Artificial Sequence
  Synthetic Sequence
cgcctctctg

SEQ ID NO: 1896 - DNA, 10 bp, Artificial Sequence
  Synthetic Sequence
gccgagaaga

SEQ ID NO: 1897 - DNA, 10 bp, Artificial Sequence
  Synthetic Sequence
atatgggcga

SEQ ID NO: 1898 - DNA, 10 bp, Artificial Sequence
  Synthetic Sequence
ctatggagta

SEQ ID NO: 1899 - DNA, 10 bp, Artificial Sequence
  Synthetic Sequence
aaaccgtaac

SEQ ID NO: 1900 - DNA, 10 bp, Artificial Sequence
  Synthetic Sequence
gggtatgttg

SEQ ID NO: 1901 - DNA, 10 bp, Artificial Sequence
  Synthetic Sequence
tatttacaaa

SEQ ID NO: 1902 - DNA, 10 bp, Artificial Sequence
  Synthetic Sequence
ccattgcggc

SEQ ID NO: 1903 - DNA, 10 bp, Artificial Sequence
  Synthetic Sequence
tcaagcgttt

SEQ ID NO: 1904 - DNA, 10 bp, Artificial Sequence
  Synthetic Sequence
accaatgttt

SEQ ID NO: 1905 - DNA, 10 bp, Artificial Sequence
  Synthetic Sequence
attcgcgcag

SEQ ID NO: 1906 - DNA, 10 bp, Artificial Sequence
  Synthetic Sequence
tgagattaac

SEQ ID NO: 1907 - DNA, 10 bp, Artificial Sequence
  Synthetic Sequence
agtcttaaat

SEQ ID NO: 1908 - DNA, 10 bp, Artificial Sequence
  Synthetic Sequence
tacggtttgc

SEQ ID NO: 1909 - DNA, 10 bp, Artificial Sequence
  Synthetic Sequence
ctcaaggagt

SEQ ID NO: 1910 - DNA, 10 bp, Artificial Sequence
  Synthetic Sequence
tctgattacc

SEQ ID NO: 1911 - DNA, 10 bp, Artificial Sequence
  Synthetic Sequence
agaacagaga

SEQ ID NO: 1912 - DNA, 10 bp, Artificial Sequence
  Synthetic Sequence
accatagatt

SEQ ID NO: 1913 - DNA, 10 bp, Artificial Sequence
  Synthetic Sequence
acatacagct

SEQ ID NO: 1914 - DNA, 10 bp, Artificial Sequence
  Synthetic Sequence
acccattacc

SEQ ID NO: 1915 - DNA, 10 bp, Artificial Sequence
  Synthetic Sequence
agccggctaa

SEQ ID NO: 1916 - DNA, 10 bp, Artificial Sequence
  Synthetic Sequence
accgaatcga

SEQ ID NO: 1917 - DNA, 10 bp, Artificial Sequence
  Synthetic Sequence
ctgtgaaatt

SEQ ID NO: 1918 - DNA, 10 bp, Artificial Sequence
  Synthetic Sequence
tctccggtat

SEQ ID NO: 1919 - DNA, 10 bp, Artificial Sequence
  Synthetic Sequence
tatgataggt

SEQ ID NO: 1920 - DNA, 10 bp, Artificial Sequence
  Synthetic Sequence
ccaaatcctt

SEQ ID NO: 1921 - DNA, 10 bp, Artificial Sequence
  Synthetic Sequence
taggccgtta

SEQ ID NO: 1922 - DNA, 10 bp, Artificial Sequence
  Synthetic Sequence
accgggactc

SEQ ID NO: 1923 - DNA, 10 bp, Artificial Sequence
  Synthetic Sequence
tgtactgccg

SEQ ID NO: 1924 - DNA, 10 bp, Artificial Sequence
  Synthetic Sequence
taagaatcac

SEQ ID NO: 1925 - DNA, 10 bp, Artificial Sequence
  Synthetic Sequence
taccatcgcg

SEQ ID NO: 1926 - DNA, 10 bp, Artificial Sequence
  Synthetic Sequence
tgtattgagg

SEQ ID NO: 1927 - DNA, 10 bp, Artificial Sequence
  Synthetic Sequence
acacgtctac

SEQ ID NO: 1928 - DNA, 10 bp, Artificial Sequence
  Synthetic Sequence
ttactgcttg

SEQ ID NO: 1929 - DNA, 10 bp, Artificial Sequence
  Synthetic Sequence
ttgaagagtg

SEQ ID NO: 1930 - DNA, 10 bp, Artificial Sequence
  Synthetic Sequence
gatcctattt

SEQ ID NO: 1931 - DNA, 10 bp, Artificial Sequence
  Synthetic Sequence
gcttgggcgt

SEQ ID NO: 1932 - DNA, 10 bp, Artificial Sequence
  Synthetic Sequence
gaataccctc

SEQ ID NO: 1933 - DNA, 10 bp, Artificial Sequence
  Synthetic Sequence
ggatggcttt

SEQ ID NO: 1934 - DNA, 10 bp, Artificial Sequence
  Synthetic Sequence
gaggtcctgt

SEQ ID NO: 1935 - DNA, 10 bp, Artificial Sequence
  Synthetic Sequence
gatcaagtcc

SEQ ID NO: 1936 - DNA, 10 bp, Artificial Sequence
  Synthetic Sequence
ttaggcaaac

SEQ ID NO: 1937 - DNA, 10 bp, Artificial Sequence
  Synthetic Sequence
agaaacttaa

SEQ ID NO: 1938 - DNA, 10 bp, Artificial Sequence
  Synthetic Sequence
cctaatcact

SEQ ID NO: 1939 - DNA, 10 bp, Artificial Sequence
  Synthetic Sequence
cggaaacggg

SEQ ID NO: 1940 - DNA, 10 bp, Artificial Sequence
  Synthetic Sequence
acaagtgcga

SEQ ID NO: 1941 - DNA, 10 bp, Artificial Sequence
  Synthetic Sequence
gagcgaaggg

SEQ ID NO: 1942 - DNA, 10 bp, Artificial Sequence
  Synthetic Sequence
aatgcaaagt

SEQ ID NO: 1943 - DNA, 10 bp, Artificial Sequence
  Synthetic Sequence
cttctccttg

SEQ ID NO: 1944 - DNA, 10 bp, Artificial Sequence
  Synthetic Sequence
attaagttat

SEQ ID NO: 1945 - DNA, 10 bp, Artificial Sequence
  Synthetic Sequence
aagataaggt

SEQ ID NO: 1946 - DNA, 10 bp, Artificial Sequence
  Synthetic Sequence
gccctgatat

SEQ ID NO: 1947 - DNA, 10 bp, Artificial Sequence
  Synthetic Sequence
ttctacacag

SEQ ID NO: 1948 - DNA, 10 bp, Artificial Sequence
  Synthetic Sequence
agcgtattag

SEQ ID NO: 1949 - DNA, 10 bp, Artificial Sequence
  Synthetic Sequence
ctttgacatc

SEQ ID NO: 1950 - DNA, 10 bp, Artificial Sequence
  Synthetic Sequence
taacactggc

SEQ ID NO: 1951 - DNA, 10 bp, Artificial Sequence
  Synthetic Sequence
gcttgggaca

SEQ ID NO: 1952 - DNA, 10 bp, Artificial Sequence
  Synthetic Sequence
aaggatgttg

SEQ ID NO: 1953 - DNA, 10 bp, Artificial Sequence
  Synthetic Sequence
ggcttaagcg

SEQ ID NO: 1954 - DNA, 10 bp, Artificial Sequence
  Synthetic Sequence
tgtcacaact

SEQ ID NO: 1955 - DNA, 10 bp, Artificial Sequence
  Synthetic Sequence
tcaataacta

SEQ ID NO: 1956 - DNA, 10 bp, Artificial Sequence
  Synthetic Sequence
catgagcact

SEQ ID NO: 1957 - DNA, 10 bp, Artificial Sequence
  Synthetic Sequence
atgcagggac

SEQ ID NO: 1958 - DNA, 10 bp, Artificial Sequence
  Synthetic Sequence
tgcaatcgga

SEQ ID NO: 1959 - DNA, 10 bp, Artificial Sequence
  Synthetic Sequence
tccggactcc

SEQ ID NO: 1960 - DNA, 10 bp, Artificial Sequence
  Synthetic Sequence
ccttaccgaa

SEQ ID NO: 1961 - DNA, 10 bp, Artificial Sequence
  Synthetic Sequence
gataaatcat

SEQ ID NO: 1962 - DNA, 10 bp, Artificial Sequence
  Synthetic Sequence
tcggtactat

SEQ ID NO: 1963 - DNA, 10 bp, Artificial Sequence
  Synthetic Sequence
attaatagct

SEQ ID NO: 1964 - DNA, 10 bp, Artificial Sequence
  Synthetic Sequence
tatttaagca

SEQ ID NO: 1965 - DNA, 10 bp, Artificial Sequence
  Synthetic Sequence
aagggattaa

SEQ ID NO: 1966 - DNA, 10 bp, Artificial Sequence
  Synthetic Sequence
gggtcacaag

SEQ ID NO: 1967 - DNA, 10 bp, Artificial Sequence
  Synthetic Sequence
tgtctgggct

SEQ ID NO: 1968 - DNA, 10 bp, Artificial Sequence
  Synthetic Sequence
tccctgtgct

SEQ ID NO: 1969 - DNA, 10 bp, Artificial Sequence
  Synthetic Sequence
gcgcctatat

SEQ ID NO: 1970 - DNA, 10 bp, Artificial Sequence
  Synthetic Sequence
tggcgcatgg

SEQ ID NO: 1971 - DNA, 10 bp, Artificial Sequence
  Synthetic Sequence
gtagtacacc

SEQ ID NO: 1972 - DNA, 10 bp, Artificial Sequence
  Synthetic Sequence
tcatagtggg

SEQ ID NO: 1973 - DNA, 10 bp, Artificial Sequence
  Synthetic Sequence
atgcgcggca

SEQ ID NO: 1974 - DNA, 10 bp, Artificial Sequence
  Synthetic Sequence
ctggatatgt

SEQ ID NO: 1975 - DNA, 10 bp, Artificial Sequence
  Synthetic Sequence
agatgattaa

SEQ ID NO: 1976 - DNA, 10 bp, Artificial Sequence
  Synthetic Sequence
gacgacggac

SEQ ID NO: 1977 - DNA, 10 bp, Artificial Sequence
  Synthetic Sequence
tttagagatt

SEQ ID NO: 1978 - DNA, 10 bp, Artificial Sequence
  Synthetic Sequence
cacgactgca

SEQ ID NO: 1979 - DNA, 10 bp, Artificial Sequence
  Synthetic Sequence
atttccttgc

SEQ ID NO: 1980 - DNA, 10 bp, Artificial Sequence
  Synthetic Sequence
ggcctcgtga

SEQ ID NO: 1981 - DNA, 10 bp, Artificial Sequence
  Synthetic Sequence
cctttctgat

SEQ ID NO: 1982 - DNA, 10 bp, Artificial Sequence
  Synthetic Sequence
aaatttcgtt

SEQ ID NO: 1983 - DNA, 10 bp, Artificial Sequence
  Synthetic Sequence
caagcgtcgc

SEQ ID NO: 1984 - DNA, 10 bp, Artificial Sequence
  Synthetic Sequence
ctaaggtcat

SEQ ID NO: 1985 - DNA, 10 bp, Artificial Sequence
  Synthetic Sequence
tatgtgtcac

SEQ ID NO: 1986 - DNA, 10 bp, Artificial Sequence
  Synthetic Sequence
acaggaaata

SEQ ID NO: 1987 - DNA, 10 bp, Artificial Sequence
  Synthetic Sequence
ttacctgcat

SEQ ID NO: 1988 - DNA, 10 bp, Artificial Sequence
  Synthetic Sequence
acggtgttcg

SEQ ID NO: 1989 - DNA, 10 bp, Artificial Sequence
  Synthetic Sequence
tggaaaggat

SEQ ID NO: 1990 - DNA, 10 bp, Artificial Sequence
  Synthetic Sequence
ctacagccca

SEQ ID NO: 1991 - DNA, 10 bp, Artificial Sequence
  Synthetic Sequence
ctgtgatcct

SEQ ID NO: 1992 - DNA, 10 bp, Artificial Sequence
  Synthetic Sequence
aatccgggta

SEQ ID NO: 1993 - DNA, 10 bp, Artificial Sequence
  Synthetic Sequence
gggattgtgt

SEQ ID NO: 1994 - DNA, 10 bp, Artificial Sequence
  Synthetic Sequence
tactgagacc

SEQ ID NO: 1995 - DNA, 10 bp, Artificial Sequence
  Synthetic Sequence
ggagctattt

SEQ ID NO: 1996 - DNA, 10 bp, Artificial Sequence
  Synthetic Sequence
gccacgtacg

SEQ ID NO: 1997 - DNA, 10 bp, Artificial Sequence
  Synthetic Sequence
acgacaggca

SEQ ID NO: 1998 - DNA, 10 bp, Artificial Sequence
  Synthetic Sequence
tcacgcttcg

SEQ ID NO: 1999 - DNA, 10 bp, Artificial Sequence
  Synthetic Sequence
tgcatttaga

SEQ ID NO: 2000 - DNA, 10 bp, Artificial Sequence
  Synthetic Sequence
cgttgaactg

SEQ ID NO: 2001 - DNA, 10 bp, Artificial Sequence
  Synthetic Sequence
aactgcgtgc

SEQ ID NO: 2002 - DNA, 10 bp, Artificial Sequence
  Synthetic Sequence
ttcgcggttt

SEQ ID NO: 2003 - DNA, 10 bp, Artificial Sequence
  Synthetic Sequence
ggtggtgagc

SEQ ID NO: 2004 - DNA, 10 bp, Artificial Sequence
  Synthetic Sequence
gcttcgaata

SEQ ID NO: 2005 - DNA, 10 bp, Artificial Sequence
  Synthetic Sequence
tgcgctacac

SEQ ID NO: 2006 - DNA, 10 bp, Artificial Sequence
  Synthetic Sequence
aacatggtaa

SEQ ID NO: 2007 - DNA, 10 bp, Artificial Sequence
  Synthetic Sequence
ttgatccctc

SEQ ID NO: 2008 - DNA, 10 bp, Artificial Sequence
  Synthetic Sequence
cgccttagtg

SEQ ID NO: 2009 - DNA, 10 bp, Artificial Sequence
  Synthetic Sequence
gacagacgcc

SEQ ID NO: 2010 - DNA, 10 bp, Artificial Sequence
  Synthetic Sequence
cactctctcc

SEQ ID NO: 2011 - DNA, 10 bp, Artificial Sequence
  Synthetic Sequence
tattgatgtt

SEQ ID NO: 2012 - DNA, 10 bp, Artificial Sequence
  Synthetic Sequence
gcgcatggag

SEQ ID NO: 2013 - DNA, 10 bp, Artificial Sequence
  Synthetic Sequence
aacacataat

SEQ ID NO: 2014 - DNA, 10 bp, Artificial Sequence
  Synthetic Sequence
ataatctccg

SEQ ID NO: 2015 - DNA, 10 bp, Artificial Sequence
  Synthetic Sequence
tcaggtaaca

SEQ ID NO: 2016 - DNA, 10 bp, Artificial Sequence
  Synthetic Sequence
tgtggccaac

SEQ ID NO: 2017 - DNA, 10 bp, Artificial Sequence
  Synthetic Sequence
tgtgtcgaaa

SEQ ID NO: 2018 - DNA, 10 bp, Artificial Sequence
  Synthetic Sequence
gtaacaccat

SEQ ID NO: 2019 - DNA, 10 bp, Artificial Sequence
  Synthetic Sequence
caatcttcgg

SEQ ID NO: 2020 - DNA, 10 bp, Artificial Sequence
  Synthetic Sequence
atccagccgt

SEQ ID NO: 2021 - DNA, 10 bp, Artificial Sequence
  Synthetic Sequence
tgctctctga

SEQ ID NO: 2022 - DNA, 10 bp, Artificial Sequence
  Synthetic Sequence
accatgtccc

SEQ ID NO: 2023 - DNA, 10 bp, Artificial Sequence
  Synthetic Sequence
cttgcatccg

SEQ ID NO: 2024 - DNA, 10 bp, Artificial Sequence
  Synthetic Sequence
aagcaaccac

SEQ ID NO: 2025 - DNA, 10 bp, Artificial Sequence
  Synthetic Sequence
agaattaacg

SEQ ID NO: 2026 - DNA, 10 bp, Artificial Sequence
  Synthetic Sequence
ccgtactcgc

SEQ ID NO: 2027 - DNA, 10 bp, Artificial Sequence
  Synthetic Sequence
aacagtagaa

SEQ ID NO: 2028 - DNA, 10 bp, Artificial Sequence
  Synthetic Sequence
ccagttccta

SEQ ID NO: 2029 - DNA, 10 bp, Artificial Sequence
  Synthetic Sequence
ccttcataaa

SEQ ID NO: 2030 - DNA, 10 bp, Artificial Sequence
  Synthetic Sequence
gtccaaggta

SEQ ID NO: 2031 - DNA, 10 bp, Artificial Sequence
  Synthetic Sequence
tgcgagctgt

SEQ ID NO: 2032 - DNA, 10 bp, Artificial Sequence
  Synthetic Sequence
cagattaatg

SEQ ID NO: 2033 - DNA, 10 bp, Artificial Sequence
  Synthetic Sequence
acctgaggtc

SEQ ID NO: 2034 - DNA, 10 bp, Artificial Sequence
  Synthetic Sequence
tctgtcactg

SEQ ID NO: 2035 - DNA, 10 bp, Artificial Sequence
  Synthetic Sequence
taaggcttaa

SEQ ID NO: 2036 - DNA, 10 bp, Artificial Sequence
  Synthetic Sequence
gacttggttt

SEQ ID NO: 2037 - DNA, 10 bp, Artificial Sequence
  Synthetic Sequence
gtttctggag

SEQ ID NO: 2038 - DNA, 10 bp, Artificial Sequence
  Synthetic Sequence
gcgataagcc

SEQ ID NO: 2039 - DNA, 10 bp, Artificial Sequence
  Synthetic Sequence
ctgctgtatc

SEQ ID NO: 2040 - DNA, 10 bp, Artificial Sequence
  Synthetic Sequence
actgtgtgac

SEQ ID NO: 2041 - DNA, 10 bp, Artificial Sequence
  Synthetic Sequence
tgggtgtata

SEQ ID NO: 2042 - DNA, 10 bp, Artificial Sequence
  Synthetic Sequence
gactgcatga

SEQ ID NO: 2043 - DNA, 10 bp, Artificial Sequence
  Synthetic Sequence
ttacgagagc

SEQ ID NO: 2044 - DNA, 10 bp, Artificial Sequence
  Synthetic Sequence
cgatgcatgt

SEQ ID NO: 2045 - DNA, 10 bp, Artificial Sequence
  Synthetic Sequence
tcgcgtgatc

SEQ ID NO: 2046 - DNA, 10 bp, Artificial Sequence
  Synthetic Sequence
ggtgctcatc

SEQ ID NO: 2047 - DNA, 10 bp, Artificial Sequence
  Synthetic Sequence
tccgcaacta

SEQ ID NO: 2048 - DNA, 10 bp, Artificial Sequence
  Synthetic Sequence
agtgagccct

SEQ ID NO: 2049 - DNA, 10 bp, Artificial Sequence
  Synthetic Sequence
cgcggacaac

SEQ ID NO: 2050 - DNA, 10 bp, Artificial Sequence
  Synthetic Sequence
ccttcaagtc

SEQ ID NO: 2051 - DNA, 10 bp, Artificial Sequence
  Synthetic Sequence
gcgtctatgg

SEQ ID NO: 2052 - DNA, 10 bp, Artificial Sequence
  Synthetic Sequence
acatagctta

SEQ ID NO: 2053 - DNA, 10 bp, Artificial Sequence
  Synthetic Sequence
taacctctgt

SEQ ID NO: 2054 - DNA, 10 bp, Artificial Sequence
  Synthetic Sequence
tgctagagtc

SEQ ID NO: 2055 - DNA, 10 bp, Artificial Sequence
  Synthetic Sequence
taccacgtct

SEQ ID NO: 2056 - DNA, 10 bp, Artificial Sequence
  Synthetic Sequence
tcattctctg

SEQ ID NO: 2057 - DNA, 10 bp, Artificial Sequence
  Synthetic Sequence
cgagtgttat

SEQ ID NO: 2058 - DNA, 10 bp, Artificial Sequence
  Synthetic Sequence
cttccgctta

SEQ ID NO: 2059 - DNA, 10 bp, Artificial Sequence
  Synthetic Sequence
ctgggacttt

SEQ ID NO: 2060 - DNA, 10 bp, Artificial Sequence
  Synthetic Sequence
aagtggtcct

SEQ ID NO: 2061 - DNA, 10 bp, Artificial Sequence
  Synthetic Sequence
ttagtagagt

SEQ ID NO: 2062 - DNA, 10 bp, Artificial Sequence
  Synthetic Sequence
tcttccgctc

SEQ ID NO: 2063 - DNA, 10 bp, Artificial Sequence
  Synthetic Sequence
tgacggttat

SEQ ID NO: 2064 - DNA, 10 bp, Artificial Sequence
  Synthetic Sequence
cgcgatagtt

SEQ ID NO: 2065 - DNA, 10 bp, Artificial Sequence
  Synthetic Sequence
tcagcacgag

SEQ ID NO: 2066 - DNA, 10 bp, Artificial Sequence
  Synthetic Sequence
tcagcgctca

SEQ ID NO: 2067 - DNA, 10 bp, Artificial Sequence
  Synthetic Sequence
gcgggtgaga

SEQ ID NO: 2068 - DNA, 10 bp, Artificial Sequence
  Synthetic Sequence
actggcgctt

SEQ ID NO: 2069 - DNA, 10 bp, Artificial Sequence
  Synthetic Sequence
tcaggacgca

SEQ ID NO: 2070 - DNA, 10 bp, Artificial Sequence
  Synthetic Sequence
aatacccgtg

SEQ ID NO: 2071 - DNA, 10 bp, Artificial Sequence
  Synthetic Sequence
agcatttgtt

SEQ ID NO: 2072 - DNA, 10 bp, Artificial Sequence
  Synthetic Sequence
tcgcataagt

SEQ ID NO: 2073 - DNA, 10 bp, Artificial Sequence
  Synthetic Sequence
atcatcacct

SEQ ID NO: 2074 - DNA, 10 bp, Artificial Sequence
  Synthetic Sequence
tgattgcagg

SEQ ID NO: 2075 - DNA, 10 bp, Artificial Sequence
  Synthetic Sequence
cctctgcaag

SEQ ID NO: 2076 - DNA, 10 bp, Artificial Sequence
  Synthetic Sequence
acctgggagg

SEQ ID NO: 2077 - DNA, 10 bp, Artificial Sequence
  Synthetic Sequence
caggtagccg

SEQ ID NO: 2078 - DNA, 10 bp, Artificial Sequence
  Synthetic Sequence
ccgactgttt

SEQ ID NO: 2079 - DNA, 10 bp, Artificial Sequence
  Synthetic Sequence
cgtactactg

SEQ ID NO: 2080 - DNA, 10 bp, Artificial Sequence
  Synthetic Sequence
gtggttgttg

SEQ ID NO: 2081 - DNA, 10 bp, Artificial Sequence
  Synthetic Sequence
atcgttggcg

SEQ ID NO: 2082 - DNA, 10 bp, Artificial Sequence
  Synthetic Sequence
ggtccacctc

SEQ ID NO: 2083 - DNA, 10 bp, Artificial Sequence
  Synthetic Sequence
gcgtagacga

SEQ ID NO: 2084 - DNA, 10 bp, Artificial Sequence
  Synthetic Sequence
cccttaccta

SEQ ID NO: 2085 - DNA, 10 bp, Artificial Sequence
  Synthetic Sequence
atgcattaca

SEQ ID NO: 2086 - DNA, 10 bp, Artificial Sequence
  Synthetic Sequence
accggtcaaa

SEQ ID NO: 2087 - DNA, 10 bp, Artificial Sequence
  Synthetic Sequence
cgtctgcact

SEQ ID NO: 2088 - DNA, 10 bp, Artificial Sequence
  Synthetic Sequence
gaccgcgaag

SEQ ID NO: 2089 - DNA, 10 bp, Artificial Sequence
  Synthetic Sequence
gaaccaaaca

SEQ ID NO: 2090 - DNA, 10 bp, Artificial Sequence
  Synthetic Sequence
cgatctggca

SEQ ID NO: 2091 - DNA, 10 bp, Artificial Sequence
  Synthetic Sequence
aggtatctat

SEQ ID NO: 2092 - DNA, 10 bp, Artificial Sequence
  Synthetic Sequence
atgagccatc

SEQ ID NO: 2093 - DNA, 10 bp, Artificial Sequence
  Synthetic Sequence
aaatcgtcat

SEQ ID NO: 2094 - DNA, 10 bp, Artificial Sequence
  Synthetic Sequence
ctgacgtaag

SEQ ID NO: 2095 - DNA, 10 bp, Artificial Sequence
  Synthetic Sequence
cgtcgggttg

SEQ ID NO: 2096 - DNA, 10 bp, Artificial Sequence
  Synthetic Sequence
attaggccct

SEQ ID NO: 2097 - DNA, 10 bp, Artificial Sequence
  Synthetic Sequence
aaacccaaat

SEQ ID NO: 2098 - DNA, 10 bp, Artificial Sequence
  Synthetic Sequence
cattacgcga

SEQ ID NO: 2099 - DNA, 10 bp, Artificial Sequence
  Synthetic Sequence
ggcacgattc

SEQ ID NO: 2100 - DNA, 10 bp, Artificial Sequence
  Synthetic Sequence
atgctgtgcc

SEQ ID NO: 2101 - DNA, 10 bp, Artificial Sequence
  Synthetic Sequence
attgtcctat

SEQ ID NO: 2102 - DNA, 10 bp, Artificial Sequence
  Synthetic Sequence
ggcgtgacaa

SEQ ID NO: 2103 - DNA, 10 bp, Artificial Sequence
  Synthetic Sequence
cgggttactg

SEQ ID NO: 2104 - DNA, 10 bp, Artificial Sequence
  Synthetic Sequence
gaaagttggg

SEQ ID NO: 2105 - DNA, 10 bp, Artificial Sequence
  Synthetic Sequence
acgtcgaaag

SEQ ID NO: 2106 - DNA, 10 bp, Artificial Sequence
  Synthetic Sequence
ttaatccacg

SEQ ID NO: 2107 - DNA, 10 bp, Artificial Sequence
  Synthetic Sequence
caagtctcga

SEQ ID NO: 2108 - DNA, 10 bp, Artificial Sequence
  Synthetic Sequence
gaacttctga

SEQ ID NO: 2109 - DNA, 10 bp, Artificial Sequence
  Synthetic Sequence
tttcagtaaa

SEQ ID NO: 2110 - DNA, 10 bp, Artificial Sequence
  Synthetic Sequence
gagcgatgtc

SEQ ID NO: 2111 - DNA, 10 bp, Artificial Sequence
  Synthetic Sequence
ctaactggcg

SEQ ID NO: 2112 - DNA, 10 bp, Artificial Sequence
  Synthetic Sequence
ccttcgggct

SEQ ID NO: 2113 - DNA, 10 bp, Artificial Sequence
  Synthetic Sequence
tcctttaggc

SEQ ID NO: 2114 - DNA, 10 bp, Artificial Sequence
  Synthetic Sequence
actcattgaa

SEQ ID NO: 2115 - DNA, 10 bp, Artificial Sequence
  Synthetic Sequence
acggctagcc

SEQ ID NO: 2116 - DNA, 10 bp, Artificial Sequence
  Synthetic Sequence
gtaggtccgg

SEQ ID NO: 2117 - DNA, 10 bp, Artificial Sequence
  Synthetic Sequence
ttgtcgagca

SEQ ID NO: 2118 - DNA, 10 bp, Artificial Sequence
  Synthetic Sequence
aaagtgtgtt

SEQ ID NO: 2119 - DNA, 10 bp, Artificial Sequence
  Synthetic Sequence
agttggcgcc

SEQ ID NO: 2120 - DNA, 10 bp, Artificial Sequence
  Synthetic Sequence
cccgataagg

SEQ ID NO: 2121 - DNA, 10 bp, Artificial Sequence
  Synthetic Sequence
gataataggg

SEQ ID NO: 2122 - DNA, 10 bp, Artificial Sequence
  Synthetic Sequence
gagaagcatg

SEQ ID NO: 2123 - DNA, 10 bp, Artificial Sequence
  Synthetic Sequence
gaaatatgac

SEQ ID NO: 2124 - DNA, 10 bp, Artificial Sequence
  Synthetic Sequence
actggagtac

SEQ ID NO: 2125 - DNA, 10 bp, Artificial Sequence
  Synthetic Sequence
ttcctcactc

SEQ ID NO: 2126 - DNA, 10 bp, Artificial Sequence
  Synthetic Sequence
cccacgtatc

SEQ ID NO: 2127 - DNA, 10 bp, Artificial Sequence
  Synthetic Sequence
gaagtttgag

SEQ ID NO: 2128 - DNA, 10 bp, Artificial Sequence
  Synthetic Sequence
cactgtccat

SEQ ID NO: 2129 - DNA, 10 bp, Artificial Sequence
  Synthetic Sequence
agtttaacgg

SEQ ID NO: 2130 - DNA, 10 bp, Artificial Sequence
  Synthetic Sequence
aggtcaatag

SEQ ID NO: 2131 - DNA, 10 bp, Artificial Sequence
  Synthetic Sequence
gcacaatctc

SEQ ID NO: 2132 - DNA, 10 bp, Artificial Sequence
  Synthetic Sequence
gcccgggtaa

SEQ ID NO: 2133 - DNA, 10 bp, Artificial Sequence
  Synthetic Sequence
ttctgccgga

SEQ ID NO: 2134 - DNA, 10 bp, Artificial Sequence
  Synthetic Sequence
ctgcctgaat

SEQ ID NO: 2135 - DNA, 10 bp, Artificial Sequence
  Synthetic Sequence
ttacccggtc

SEQ ID NO: 2136 - DNA, 10 bp, Artificial Sequence
  Synthetic Sequence
tttcatgcac

SEQ ID NO: 2137 - DNA, 10 bp, Artificial Sequence
  Synthetic Sequence
gcgggcaaag

SEQ ID NO: 2138 - DNA, 10 bp, Artificial Sequence
  Synthetic Sequence
agctcgatat

SEQ ID NO: 2139 - DNA, 10 bp, Artificial Sequence
  Synthetic Sequence
accatcggag

SEQ ID NO: 2140 - DNA, 10 bp, Artificial Sequence
  Synthetic Sequence
agattcaatt

SEQ ID NO: 2141 - DNA, 10 bp, Artificial Sequence
  Synthetic Sequence
tgcccgtgtc

SEQ ID NO: 2142 - DNA, 10 bp, Artificial Sequence
  Synthetic Sequence
gacacagcta

SEQ ID NO: 2143 - DNA, 10 bp, Artificial Sequence
  Synthetic Sequence
gtgtcgctca

SEQ ID NO: 2144 - DNA, 10 bp, Artificial Sequence
  Synthetic Sequence
gttcgacgct

SEQ ID NO: 2145 - DNA, 10 bp, Artificial Sequence
  Synthetic Sequence
catcggctcg

SEQ ID NO: 2146 - DNA, 10 bp, Artificial Sequence
  Synthetic Sequence
tgaaccagct

SEQ ID NO: 2147 - DNA, 10 bp, Artificial Sequence
  Synthetic Sequence
acgagacccg

SEQ ID NO: 2148 - DNA, 10 bp, Artificial Sequence
  Synthetic Sequence
gatccgctga

SEQ ID NO: 2149 - DNA, 10 bp, Artificial Sequence
  Synthetic Sequence
tttatttgta

SEQ ID NO: 2150 - DNA, 10 bp, Artificial Sequence
  Synthetic Sequence
taggatacca

SEQ ID NO: 2151 - DNA, 10 bp, Artificial Sequence
  Synthetic Sequence
ggtcgctcgt

SEQ ID NO: 2152 - DNA, 10 bp, Artificial Sequence
  Synthetic Sequence
cctattaagt

SEQ ID NO: 2153 - DNA, 10 bp, Artificial Sequence
  Synthetic Sequence
attgttattg

SEQ ID NO: 2154 - DNA, 10 bp, Artificial Sequence
  Synthetic Sequence
ggtcagcggt

SEQ ID NO: 2155 - DNA, 10 bp, Artificial Sequence
  Synthetic Sequence
tgtgcactga

SEQ ID NO: 2156 - DNA, 10 bp, Artificial Sequence
  Synthetic Sequence
ccgcctcaac

SEQ ID NO: 2157 - DNA, 10 bp, Artificial Sequence
  Synthetic Sequence
tacaaacagt

SEQ ID NO: 2158 - DNA, 10 bp, Artificial Sequence
  Synthetic Sequence
tttaagccgt

SEQ ID NO: 2159 - DNA, 10 bp, Artificial Sequence
  Synthetic Sequence
cacgttatcc

SEQ ID NO: 2160 - DNA, 10 bp, Artificial Sequence
  Synthetic Sequence
gttaagacac

SEQ ID NO: 2161 - DNA, 10 bp, Artificial Sequence
  Synthetic Sequence
ttataggtcc

SEQ ID NO: 2162 - DNA, 10 bp, Artificial Sequence
  Synthetic Sequence
tacctacata

SEQ ID NO: 2163 - DNA, 10 bp, Artificial Sequence
  Synthetic Sequence
ctttctcctt

SEQ ID NO: 2164 - DNA, 10 bp, Artificial Sequence
  Synthetic Sequence
tactggagtg

SEQ ID NO: 2165 - DNA, 10 bp, Artificial Sequence
  Synthetic Sequence
atgggcactg

SEQ ID NO: 2166 - DNA, 10 bp, Artificial Sequence
  Synthetic Sequence
ctattctata

SEQ ID NO: 2167 - DNA, 10 bp, Artificial Sequence
  Synthetic Sequence
aaggtccttc

SEQ ID NO: 2168 - DNA, 10 bp, Artificial Sequence
  Synthetic Sequence
tggatattca

SEQ ID NO: 2169 - DNA, 10 bp, Artificial Sequence
  Synthetic Sequence
gaacacgcag

SEQ ID NO: 2170 - DNA, 10 bp, Artificial Sequence
  Synthetic Sequence
tgcttaggtg

SEQ ID NO: 2171 - DNA, 10 bp, Artificial Sequence
  Synthetic Sequence
cgcaatcacg

SEQ ID NO: 2172 - DNA, 10 bp, Artificial Sequence
  Synthetic Sequence
agtgaggaag

SEQ ID NO: 2173 - DNA, 10 bp, Artificial Sequence
  Synthetic Sequence
cggtcatccg

SEQ ID NO: 2174 - DNA, 10 bp, Artificial Sequence
  Synthetic Sequence
caactagtag

SEQ ID NO: 2175 - DNA, 10 bp, Artificial Sequence
  Synthetic Sequence
taccagtgta

SEQ ID NO: 2176 - DNA, 10 bp, Artificial Sequence
  Synthetic Sequence
ccttccgaat

SEQ ID NO: 2177 - DNA, 10 bp, Artificial Sequence
  Synthetic Sequence
ccagaagcgg

SEQ ID NO: 2178 - DNA, 10 bp, Artificial Sequence
  Synthetic Sequence
aactccacgc

SEQ ID NO: 2179 - DNA, 10 bp, Artificial Sequence
  Synthetic Sequence
gggtcgtgat

SEQ ID NO: 2180 - DNA, 10 bp, Artificial Sequence
  Synthetic Sequence
gtaccgcttc

SEQ ID NO: 2181 - DNA, 10 bp, Artificial Sequence
  Synthetic Sequence
cacgagcaac

SEQ ID NO: 2182 - DNA, 10 bp, Artificial Sequence
  Synthetic Sequence
aaggcggcaa

SEQ ID NO: 2183 - DNA, 10 bp, Artificial Sequence
  Synthetic Sequence
aatgtcgttg

SEQ ID NO: 2184 - DNA, 10 bp, Artificial Sequence
  Synthetic Sequence
ctgtcccgga

SEQ ID NO: 2185 - DNA, 10 bp, Artificial Sequence
  Synthetic Sequence
tcctcagtaa

SEQ ID NO: 2186 - DNA, 10 bp, Artificial Sequence
  Synthetic Sequence
gggtgaaact

SEQ ID NO: 2187 - DNA, 10 bp, Artificial Sequence
  Synthetic Sequence
attgtaggac

SEQ ID NO: 2188 - DNA, 10 bp, Artificial Sequence
  Synthetic Sequence
aaacggcgta

SEQ ID NO: 2189 - DNA, 10 bp, Artificial Sequence
  Synthetic Sequence
gtacattaag

SEQ ID NO: 2190 - DNA, 10 bp, Artificial Sequence
  Synthetic Sequence
gccacaagac

SEQ ID NO: 2191 - DNA, 10 bp, Artificial Sequence
  Synthetic Sequence
taagagctcc

SEQ ID NO: 2192 - DNA, 10 bp, Artificial Sequence
  Synthetic Sequence
taaacatgat

SEQ ID NO: 2193 - DNA, 10 bp, Artificial Sequence
  Synthetic Sequence
gaccagactc

SEQ ID NO: 2194 - DNA, 10 bp, Artificial Sequence
  Synthetic Sequence
agaagacaca

SEQ ID NO: 2195 - DNA, 10 bp, Artificial Sequence
  Synthetic Sequence
gcgatccaca

SEQ ID NO: 2196 - DNA, 10 bp, Artificial Sequence
  Synthetic Sequence
cgtccatgta

SEQ ID NO: 2197 - DNA, 10 bp, Artificial Sequence
  Synthetic Sequence
ccttcctccg

SEQ ID NO: 2198 - DNA, 10 bp, Artificial Sequence
  Synthetic Sequence
cggagattcg

SEQ ID NO: 2199 - DNA, 10 bp, Artificial Sequence
  Synthetic Sequence
aactcgagct

SEQ ID NO: 2200 - DNA, 10 bp, Artificial Sequence
  Synthetic Sequence
ataaatgtga

SEQ ID NO: 2201 - DNA, 10 bp, Artificial Sequence
  Synthetic Sequence
cagttcatga

SEQ ID NO: 2202 - DNA, 10 bp, Artificial Sequence
  Synthetic Sequence
acctcgactt

SEQ ID NO: 2203 - DNA, 10 bp, Artificial Sequence
  Synthetic Sequence
ccgattgagc

SEQ ID NO: 2204 - DNA, 10 bp, Artificial Sequence
  Synthetic Sequence
aataataata

SEQ ID NO: 2205 - DNA, 10 bp, Artificial Sequence
  Synthetic Sequence
aacgcgatag

SEQ ID NO: 2206 - DNA, 10 bp, Artificial Sequence
  Synthetic Sequence
gctttggtcc

SEQ ID NO: 2207 - DNA, 10 bp, Artificial Sequence
  Synthetic Sequence
ctttgcacgc

SEQ ID NO: 2208 - DNA, 10 bp, Artificial Sequence
  Synthetic Sequence
tacaggtaat

SEQ ID NO: 2209 - DNA, 10 bp, Artificial Sequence
  Synthetic Sequence
tgcagcctcc

SEQ ID NO: 2210 - DNA, 10 bp, Artificial Sequence
  Synthetic Sequence
aacggtgtat

SEQ ID NO: 2211 - DNA, 10 bp, Artificial Sequence
  Synthetic Sequence
gggttagtac

SEQ ID NO: 2212 - DNA, 10 bp, Artificial Sequence
  Synthetic Sequence
aagaacaact

SEQ ID NO: 2213 - DNA, 10 bp, Artificial Sequence
  Synthetic Sequence
caggcgttct

SEQ ID NO: 2214 - DNA, 10 bp, Artificial Sequence
  Synthetic Sequence
gatggaatgg

SEQ ID NO: 2215 - DNA, 10 bp, Artificial Sequence
  Synthetic Sequence
gtgtgcgctt

SEQ ID NO: 2216 - DNA, 10 bp, Artificial Sequence
  Synthetic Sequence
cctcttctac

SEQ ID NO: 2217 - DNA, 10 bp, Artificial Sequence
  Synthetic Sequence
atgcacgagc

SEQ ID NO: 2218 - DNA, 10 bp, Artificial Sequence
  Synthetic Sequence
aggagaacag

SEQ ID NO: 2219 - DNA, 10 bp, Artificial Sequence
  Synthetic Sequence
agatccgcgg

SEQ ID NO: 2220 - DNA, 10 bp, Artificial Sequence
  Synthetic Sequence
ggttaagaga

SEQ ID NO: 2221 - DNA, 10 bp, Artificial Sequence
  Synthetic Sequence
ctctcgactc

SEQ ID NO: 2222 - DNA, 10 bp, Artificial Sequence
  Synthetic Sequence
atttgtaggg

SEQ ID NO: 2223 - DNA, 10 bp, Artificial Sequence
  Synthetic Sequence
tcccaagttc

SEQ ID NO: 2224 - DNA, 10 bp, Artificial Sequence
  Synthetic Sequence
ccgataacag

SEQ ID NO: 2225 - DNA, 10 bp, Artificial Sequence
  Synthetic Sequence
catggcagcc

SEQ ID NO: 2226 - DNA, 10 bp, Artificial Sequence
  Synthetic Sequence
agcatgacta

SEQ ID NO: 2227 - DNA, 10 bp, Artificial Sequence
  Synthetic Sequence
ctctcatacg

SEQ ID NO: 2228 - DNA, 10 bp, Artificial Sequence
  Synthetic Sequence
aatgccgctc

SEQ ID NO: 2229 - DNA, 10 bp, Artificial Sequence
  Synthetic Sequence
ggcgttgtcc

SEQ ID NO: 2230 - DNA, 10 bp, Artificial Sequence
  Synthetic Sequence
agggacttgc

SEQ ID NO: 2231 - DNA, 10 bp, Artificial Sequence
  Synthetic Sequence
cgctgcctaa

SEQ ID NO: 2232 - DNA, 10 bp, Artificial Sequence
  Synthetic Sequence
tggaggtgtg

SEQ ID NO: 2233 - DNA, 10 bp, Artificial Sequence
  Synthetic Sequence
ccaatggagg

SEQ ID NO: 2234 - DNA, 10 bp, Artificial Sequence
  Synthetic Sequence
tagacgtcgt

SEQ ID NO: 2235 - DNA, 10 bp, Artificial Sequence
  Synthetic Sequence
gatattccta

SEQ ID NO: 2236 - DNA, 10 bp, Artificial Sequence
  Synthetic Sequence
agtccctaag

SEQ ID NO: 2237 - DNA, 10 bp, Artificial Sequence
  Synthetic Sequence
gattggccct

SEQ ID NO: 2238 - DNA, 10 bp, Artificial Sequence
  Synthetic Sequence
ttactgtcgc

SEQ ID NO: 2239 - DNA, 10 bp, Artificial Sequence
  Synthetic Sequence
cacaggtggg

SEQ ID NO: 2240 - DNA, 10 bp, Artificial Sequence
  Synthetic Sequence
ggactataca

SEQ ID NO: 2241 - DNA, 10 bp, Artificial Sequence
  Synthetic Sequence
cactacaagg

SEQ ID NO: 2242 - DNA, 10 bp, Artificial Sequence
  Synthetic Sequence
atcatcctaa

SEQ ID NO: 2243 - DNA, 10 bp, Artificial Sequence
  Synthetic Sequence
tttacgagta

SEQ ID NO: 2244 - DNA, 10 bp, Artificial Sequence
  Synthetic Sequence
gacttgatgc

SEQ ID NO: 2245 - DNA, 10 bp, Artificial Sequence
  Synthetic Sequence
agcttctttc

SEQ ID NO: 2246 - DNA, 10 bp, Artificial Sequence
  Synthetic Sequence
taacctttcc

SEQ ID NO: 2247 - DNA, 10 bp, Artificial Sequence
  Synthetic Sequence
attctacatc

SEQ ID NO: 2248 - DNA, 10 bp, Artificial Sequence
  Synthetic Sequence
ggcatcatca

SEQ ID NO: 2249 - DNA, 10 bp, Artificial Sequence
  Synthetic Sequence
gatgtctgtt

SEQ ID NO: 2250 - DNA, 10 bp, Artificial Sequence
  Synthetic Sequence
ctttgtttcc

SEQ ID NO: 2251 - DNA, 10 bp, Artificial Sequence
  Synthetic Sequence
aaatgttgac

SEQ ID NO: 2252 - DNA, 10 bp, Artificial Sequence
  Synthetic Sequence
ggtggatacg

SEQ ID NO: 2253 - DNA, 10 bp, Artificial Sequence
  Synthetic Sequence
ttatgcggta

SEQ ID NO: 2254 - DNA, 10 bp, Artificial Sequence
  Synthetic Sequence
aatgaaccga

SEQ ID NO: 2255 - DNA, 10 bp, Artificial Sequence
  Synthetic Sequence
ggaacctccg

SEQ ID NO: 2256 - DNA, 10 bp, Artificial Sequence
  Synthetic Sequence
ttcctggtag

SEQ ID NO: 2257 - DNA, 10 bp, Artificial Sequence
  Synthetic Sequence
acagacgcga

SEQ ID NO: 2258 - DNA, 10 bp, Artificial Sequence
  Synthetic Sequence
tatcctcgta

SEQ ID NO: 2259 - DNA, 10 bp, Artificial Sequence
  Synthetic Sequence
tctaagaaga

SEQ ID NO: 2260 - DNA, 10 bp, Artificial Sequence
  Synthetic Sequence
atgacaattc

SEQ ID NO: 2261 - DNA, 10 bp, Artificial Sequence
  Synthetic Sequence
taatcagagt

SEQ ID NO: 2262 - DNA, 10 bp, Artificial Sequence
  Synthetic Sequence
cttcccgcaa

SEQ ID NO: 2263 - DNA, 10 bp, Artificial Sequence
  Synthetic Sequence
ggagcagcaa

SEQ ID NO: 2264 - DNA, 10 bp, Artificial Sequence
  Synthetic Sequence
tagaagattc

SEQ ID NO: 2265 - DNA, 10 bp, Artificial Sequence
  Synthetic Sequence
gcgcgtttgc

SEQ ID NO: 2266 - DNA, 10 bp, Artificial Sequence
  Synthetic Sequence
aacggacacc

SEQ ID NO: 2267 - DNA, 10 bp, Artificial Sequence
  Synthetic Sequence
atcctgatgc

SEQ ID NO: 2268 - DNA, 10 bp, Artificial Sequence
  Synthetic Sequence
gtggttgaat

SEQ ID NO: 2269 - DNA, 10 bp, Artificial Sequence
  Synthetic Sequence
atgtaactcg

SEQ ID NO: 2270 - DNA, 10 bp, Artificial Sequence
  Synthetic Sequence
tgcactccca

SEQ ID NO: 2271 - DNA, 10 bp, Artificial Sequence
  Synthetic Sequence
caccataccg

SEQ ID NO: 2272 - DNA, 10 bp, Artificial Sequence
  Synthetic Sequence
gtccggtgca

SEQ ID NO: 2273 - DNA, 10 bp, Artificial Sequence
  Synthetic Sequence
ccaaacctgg

SEQ ID NO: 2274 - DNA, 10 bp, Artificial Sequence
  Synthetic Sequence
tctggttgag

SEQ ID NO: 2275 - DNA, 10 bp, Artificial Sequence
  Synthetic Sequence
ccggtggtag

SEQ ID NO: 2276 - DNA, 10 bp, Artificial Sequence
  Synthetic Sequence
gcacccatct

SEQ ID NO: 2277 - DNA, 10 bp, Artificial Sequence
  Synthetic Sequence
agggatggct

SEQ ID NO: 2278 - DNA, 10 bp, Artificial Sequence
  Synthetic Sequence
catcaggcgc

SEQ ID NO: 2279 - DNA, 10 bp, Artificial Sequence
  Synthetic Sequence
ggtctggtac

SEQ ID NO: 2280 - DNA, 10 bp, Artificial Sequence
  Synthetic Sequence
gtaaccagta

SEQ ID NO: 2281 - DNA, 10 bp, Artificial Sequence
  Synthetic Sequence
catccattaa

SEQ ID NO: 2282 - DNA, 10 bp, Artificial Sequence
  Synthetic Sequence
acgaataggt

SEQ ID NO: 2283 - DNA, 10 bp, Artificial Sequence
  Synthetic Sequence
aatgcgttgc

SEQ ID NO: 2284 - DNA, 10 bp, Artificial Sequence
  Synthetic Sequence
cctaagtttg

SEQ ID NO: 2285 - DNA, 10 bp, Artificial Sequence
  Synthetic Sequence
gtcacaggtt

SEQ ID NO: 2286 - DNA, 10 bp, Artificial Sequence
  Synthetic Sequence
atgaagggcg

SEQ ID NO: 2287 - DNA, 10 bp, Artificial Sequence
  Synthetic Sequence
ccaatatgca

SEQ ID NO: 2288 - DNA, 10 bp, Artificial Sequence
  Synthetic Sequence
aaccagaggc

SEQ ID NO: 2289 - DNA, 10 bp, Artificial Sequence
  Synthetic Sequence
gctgattcgc

SEQ ID NO: 2290 - DNA, 10 bp, Artificial Sequence
  Synthetic Sequence
tctcgctaca

SEQ ID NO: 2291 - DNA, 10 bp, Artificial Sequence
  Synthetic Sequence
tagagacata

SEQ ID NO: 2292 - DNA, 10 bp, Artificial Sequence
  Synthetic Sequence
taagcagcct

SEQ ID NO: 2293 - DNA, 10 bp, Artificial Sequence
  Synthetic Sequence
gcattatacc

SEQ ID NO: 2294 - DNA, 10 bp, Artificial Sequence
  Synthetic Sequence
gggatatcga

SEQ ID NO: 2295 - DNA, 10 bp, Artificial Sequence
  Synthetic Sequence
cgtcacatgg

SEQ ID NO: 2296 - DNA, 10 bp, Artificial Sequence
  Synthetic Sequence
gccttcgcct

SEQ ID NO: 2297 - DNA, 10 bp, Artificial Sequence
  Synthetic Sequence
caaacctact

SEQ ID NO: 2298 - DNA, 10 bp, Artificial Sequence
  Synthetic Sequence
aacactcaaa

SEQ ID NO: 2299 - DNA, 10 bp, Artificial Sequence
  Synthetic Sequence
agagcgtgcc

SEQ ID NO: 2300 - DNA, 10 bp, Artificial Sequence
  Synthetic Sequence
ctcgaaggat

SEQ ID NO: 2301 - DNA, 10 bp, Artificial Sequence
  Synthetic Sequence
atctatcatg

SEQ ID NO: 2302 - DNA, 10 bp, Artificial Sequence
  Synthetic Sequence
cgatatgacc

SEQ ID NO: 2303 - DNA, 10 bp, Artificial Sequence
  Synthetic Sequence
tggtgcgctc

SEQ ID NO: 2304 - DNA, 10 bp, Artificial Sequence
  Synthetic Sequence
tcttgcaccg

SEQ ID NO: 2305 - DNA, 10 bp, Artificial Sequence
  Synthetic Sequence
caacaatgtt

SEQ ID NO: 2306 - DNA, 10 bp, Artificial Sequence
  Synthetic Sequence
ctatgatcaa

SEQ ID NO: 2307 - DNA, 10 bp, Artificial Sequence
  Synthetic Sequence
gttcgaatcc

SEQ ID NO: 2308 - DNA, 10 bp, Artificial Sequence
  Synthetic Sequence
cctgactaac

SEQ ID NO: 2309 - DNA, 10 bp, Artificial Sequence
  Synthetic Sequence
gttctacaca

SEQ ID NO: 2310 - DNA, 10 bp, Artificial Sequence
  Synthetic Sequence
caaggtgcat

SEQ ID NO: 2311 - DNA, 10 bp, Artificial Sequence
  Synthetic Sequence
tggctttcta

SEQ ID NO: 2312 - DNA, 10 bp, Artificial Sequence
  Synthetic Sequence
ggccgcaaat

SEQ ID NO: 2313 - DNA, 10 bp, Artificial Sequence
  Synthetic Sequence
gtgcacacag

SEQ ID NO: 2314 - DNA, 10 bp, Artificial Sequence
  Synthetic Sequence
tcaagctctc

SEQ ID NO: 2315 - DNA, 10 bp, Artificial Sequence
  Synthetic Sequence
gaatccgatg

SEQ ID NO: 2316 - DNA, 10 bp, Artificial Sequence
  Synthetic Sequence
tcacttctat

SEQ ID NO: 2317 - DNA, 10 bp, Artificial Sequence
  Synthetic Sequence
cagcgggaaa

SEQ ID NO: 2318 - DNA, 10 bp, Artificial Sequence
  Synthetic Sequence
acgacgatta

SEQ ID NO: 2319 - DNA, 10 bp, Artificial Sequence
  Synthetic Sequence
atactatcga

SEQ ID NO: 2320 - DNA, 10 bp, Artificial Sequence
  Synthetic Sequence
agcgagactg

SEQ ID NO: 2321 - DNA, 10 bp, Artificial Sequence
  Synthetic Sequence
tcgtaacacg

SEQ ID NO: 2322 - DNA, 10 bp, Artificial Sequence
  Synthetic Sequence
gaaaccattc

SEQ ID NO: 2323 - DNA, 10 bp, Artificial Sequence
  Synthetic Sequence
cttcgtggac

SEQ ID NO: 2324 - DNA, 10 bp, Artificial Sequence
  Synthetic Sequence
gggaccctaa

SEQ ID NO: 2325 - DNA, 10 bp, Artificial Sequence
  Synthetic Sequence
ctgagggttc

SEQ ID NO: 2326 - DNA, 10 bp, Artificial Sequence
  Synthetic Sequence
taacgaggac

SEQ ID NO: 2327 - DNA, 10 bp, Artificial Sequence
  Synthetic Sequence
ctgggttggg

SEQ ID NO: 2328 - DNA, 10 bp, Artificial Sequence
  Synthetic Sequence
tagtagatcg

SEQ ID NO: 2329 - DNA, 10 bp, Artificial Sequence
  Synthetic Sequence
tagcgactct

SEQ ID NO: 2330 - DNA, 10 bp, Artificial Sequence
  Synthetic Sequence
gatcgctgag

SEQ ID NO: 2331 - DNA, 10 bp, Artificial Sequence
  Synthetic Sequence
cctaactcca

SEQ ID NO: 2332 - DNA, 10 bp, Artificial Sequence
  Synthetic Sequence
agctgaccgg

SEQ ID NO: 2333 - DNA, 10 bp, Artificial Sequence
  Synthetic Sequence
tctactacgt

SEQ ID NO: 2334 - DNA, 10 bp, Artificial Sequence
  Synthetic Sequence
caaatagccc

SEQ ID NO: 2335 - DNA, 10 bp, Artificial Sequence
  Synthetic Sequence
atgccgatcc

SEQ ID NO: 2336 - DNA, 10 bp, Artificial Sequence
  Synthetic Sequence
ctgactaggg

SEQ ID NO: 2337 - DNA, 10 bp, Artificial Sequence
  Synthetic Sequence
cgcagtacgc

SEQ ID NO: 2338 - DNA, 10 bp, Artificial Sequence
  Synthetic Sequence
tgaagctgga

SEQ ID NO: 2339 - DNA, 10 bp, Artificial Sequence
  Synthetic Sequence
ttataacaag

SEQ ID NO: 2340 - DNA, 10 bp, Artificial Sequence
  Synthetic Sequence
tatgcaccgc

SEQ ID NO: 2341 - DNA, 10 bp, Artificial Sequence
  Synthetic Sequence
ggtcctcagg

SEQ ID NO: 2342 - DNA, 10 bp, Artificial Sequence
  Synthetic Sequence
gtcaagacgg

SEQ ID NO: 2343 - DNA, 10 bp, Artificial Sequence
  Synthetic Sequence
gttagcagtg

SEQ ID NO: 2344 - DNA, 10 bp, Artificial Sequence
  Synthetic Sequence
tatatgacgg

SEQ ID NO: 2345 - DNA, 10 bp, Artificial Sequence
  Synthetic Sequence
caacgcgctc

SEQ ID NO: 2346 - DNA, 10 bp, Artificial Sequence
  Synthetic Sequence
aggcaatata

SEQ ID NO: 2347 - DNA, 10 bp, Artificial Sequence
  Synthetic Sequence
atgataacgg

SEQ ID NO: 2348 - DNA, 10 bp, Artificial Sequence
  Synthetic Sequence
ggcgctgata

SEQ ID NO: 2349 - DNA, 10 bp, Artificial Sequence
  Synthetic Sequence
ccacaacttc

SEQ ID NO: 2350 - DNA, 10 bp, Artificial Sequence
  Synthetic Sequence
gtgcccttat

SEQ ID NO: 2351 - DNA, 10 bp, Artificial Sequence
  Synthetic Sequence
atccaccgtc

SEQ ID NO: 2352 - DNA, 10 bp, Artificial Sequence
  Synthetic Sequence
tacgttaatc

SEQ ID NO: 2353 - DNA, 10 bp, Artificial Sequence
  Synthetic Sequence
tggacggtcg

SEQ ID NO: 2354 - DNA, 10 bp, Artificial Sequence
  Synthetic Sequence
aaatcctgca

SEQ ID NO: 2355 - DNA, 10 bp, Artificial Sequence
  Synthetic Sequence
cggaaggtcc

SEQ ID NO: 2356 - DNA, 10 bp, Artificial Sequence
  Synthetic Sequence
cgcagaatga

SEQ ID NO: 2357 - DNA, 10 bp, Artificial Sequence
  Synthetic Sequence
caatctcata

SEQ ID NO: 2358 - DNA, 10 bp, Artificial Sequence
  Synthetic Sequence
ttgtcgcccg

SEQ ID NO: 2359 - DNA, 10 bp, Artificial Sequence
  Synthetic Sequence
aacgggtgga

SEQ ID NO: 2360 - DNA, 10 bp, Artificial Sequence
  Synthetic Sequence
gcctctgaga

SEQ ID NO: 2361 - DNA, 10 bp, Artificial Sequence
  Synthetic Sequence
agacacacta

SEQ ID NO: 2362 - DNA, 10 bp, Artificial Sequence
  Synthetic Sequence
ttcggtccgt

SEQ ID NO: 2363 - DNA, 10 bp, Artificial Sequence
  Synthetic Sequence
taggtagttc

SEQ ID NO: 2364 - DNA, 10 bp, Artificial Sequence
  Synthetic Sequence
caagctcagc

SEQ ID NO: 2365 - DNA, 10 bp, Artificial Sequence
  Synthetic Sequence
tggcttcact

SEQ ID NO: 2366 - DNA, 10 bp, Artificial Sequence
  Synthetic Sequence
aaggaaactc

SEQ ID NO: 2367 - DNA, 10 bp, Artificial Sequence
  Synthetic Sequence
caaggtcgcc

SEQ ID NO: 2368 - DNA, 10 bp, Artificial Sequence
  Synthetic Sequence
actagctgat

SEQ ID NO: 2369 - DNA, 10 bp, Artificial Sequence
  Synthetic Sequence
ggatatccta

SEQ ID NO: 2370 - DNA, 10 bp, Artificial Sequence
  Synthetic Sequence
gaagcgtata

SEQ ID NO: 2371 - DNA, 10 bp, Artificial Sequence
  Synthetic Sequence
tccggcgtgt

SEQ ID NO: 2372 - DNA, 10 bp, Artificial Sequence
  Synthetic Sequence
aatgataacg

SEQ ID NO: 2373 - DNA, 10 bp, Artificial Sequence
  Synthetic Sequence
cattgactgt

SEQ ID NO: 2374 - DNA, 10 bp, Artificial Sequence
  Synthetic Sequence
gaattgcgac

SEQ ID NO: 2375 - DNA, 10 bp, Artificial Sequence
  Synthetic Sequence
tggtgtttag

SEQ ID NO: 2376 - DNA, 10 bp, Artificial Sequence
  Synthetic Sequence
atcaacggct

SEQ ID NO: 2377 - DNA, 10 bp, Artificial Sequence
  Synthetic Sequence
agatattgga

SEQ ID NO: 2378 - DNA, 10 bp, Artificial Sequence
  Synthetic Sequence
cctatccgta

SEQ ID NO: 2379 - DNA, 10 bp, Artificial Sequence
  Synthetic Sequence
ctttctataa

SEQ ID NO: 2380 - DNA, 10 bp, Artificial Sequence
  Synthetic Sequence
gtgccgtcta

SEQ ID NO: 2381 - DNA, 10 bp, Artificial Sequence
  Synthetic Sequence
tcactggtca

SEQ ID NO: 2382 - DNA, 10 bp, Artificial Sequence
  Synthetic Sequence
gtagccggtg

SEQ ID NO: 2383 - DNA, 10 bp, Artificial Sequence
  Synthetic Sequence
ggccagtcct

SEQ ID NO: 2384 - DNA, 10 bp, Artificial Sequence
  Synthetic Sequence
ctaacggcgc

SEQ ID NO: 2385 - DNA, 10 bp, Artificial Sequence
  Synthetic Sequence
tcccgcgtag

SEQ ID NO: 2386 - DNA, 10 bp, Artificial Sequence
  Synthetic Sequence
tatatccgcc

SEQ ID NO: 2387 - DNA, 10 bp, Artificial Sequence
  Synthetic Sequence
gtctccctaa

SEQ ID NO: 2388 - DNA, 10 bp, Artificial Sequence
  Synthetic Sequence
ttaactctta

SEQ ID NO: 2389 - DNA, 10 bp, Artificial Sequence
  Synthetic Sequence
tactggcttc

SEQ ID NO: 2390 - DNA, 10 bp, Artificial Sequence
  Synthetic Sequence
gcaaggaccg

SEQ ID NO: 2391 - DNA, 10 bp, Artificial Sequence
  Synthetic Sequence
gtcctcctac

SEQ ID NO: 2392 - DNA, 10 bp, Artificial Sequence
  Synthetic Sequence
cagcgttccg

SEQ ID NO: 2393 - DNA, 10 bp, Artificial Sequence
  Synthetic Sequence
ggcatctgag

SEQ ID NO: 2394 - DNA, 10 bp, Artificial Sequence
  Synthetic Sequence
gtatctactg

SEQ ID NO: 2395 - DNA, 10 bp, Artificial Sequence
  Synthetic Sequence
ggctggatac

SEQ ID NO: 2396 - DNA, 10 bp, Artificial Sequence
  Synthetic Sequence
ccgtggtata

SEQ ID NO: 2397 - DNA, 10 bp, Artificial Sequence
  Synthetic Sequence
aaggtcggtt

SEQ ID NO: 2398 - DNA, 10 bp, Artificial Sequence
  Synthetic Sequence
tgctcttaac

SEQ ID NO: 2399 - DNA, 10 bp, Artificial Sequence
  Synthetic Sequence
ccgctgatcc

SEQ ID NO: 2400 - DNA, 10 bp, Artificial Sequence
  Synthetic Sequence
cttaggcaat

SEQ ID NO: 2401 - DNA, 10 bp, Artificial Sequence
  Synthetic Sequence
tacgagatca

SEQ ID NO: 2402 - DNA, 10 bp, Artificial Sequence
  Synthetic Sequence
acaccctgta

SEQ ID NO: 2403 - DNA, 10 bp, Artificial Sequence
  Synthetic Sequence
cctgtggact

SEQ ID NO: 2404 - DNA, 10 bp, Artificial Sequence
  Synthetic Sequence
acgacttata

SEQ ID NO: 2405 - DNA, 10 bp, Artificial Sequence
  Synthetic Sequence
catattcgga

SEQ ID NO: 2406 - DNA, 10 bp, Artificial Sequence
  Synthetic Sequence
gatcatggcg

SEQ ID NO: 2407 - DNA, 10 bp, Artificial Sequence
  Synthetic Sequence
tagtcaagtt

SEQ ID NO: 2408 - DNA, 10 bp, Artificial Sequence
  Synthetic Sequence
acggttaacg

SEQ ID NO: 2409 - DNA, 10 bp, Artificial Sequence
  Synthetic Sequence
atgcttgaac

SEQ ID NO: 2410 - DNA, 10 bp, Artificial Sequence
  Synthetic Sequence
atttggtagg

SEQ ID NO: 2411 - DNA, 10 bp, Artificial Sequence
  Synthetic Sequence
aaattgaatc

SEQ ID NO: 2412 - DNA, 10 bp, Artificial Sequence
  Synthetic Sequence
gttgccaacc

SEQ ID NO: 2413 - DNA, 10 bp, Artificial Sequence
  Synthetic Sequence
actcctggat

SEQ ID NO: 2414 - DNA, 10 bp, Artificial Sequence
  Synthetic Sequence
cacataagcg

SEQ ID NO: 2415 - DNA, 10 bp, Artificial Sequence
  Synthetic Sequence
cttactagca

SEQ ID NO: 2416 - DNA, 10 bp, Artificial Sequence
  Synthetic Sequence
cgttccagca

SEQ ID NO: 2417 - DNA, 10 bp, Artificial Sequence
  Synthetic Sequence
tatgcagatt

SEQ ID NO: 2418 - DNA, 10 bp, Artificial Sequence
  Synthetic Sequence
ctgtttccgg

SEQ ID NO: 2419 - DNA, 10 bp, Artificial Sequence
  Synthetic Sequence
tgcacattgc

SEQ ID NO: 2420 - DNA, 10 bp, Artificial Sequence
  Synthetic Sequence
gctaggagag

SEQ ID NO: 2421 - DNA, 10 bp, Artificial Sequence
  Synthetic Sequence
tcagcctcca

SEQ ID NO: 2422 - DNA, 10 bp, Artificial Sequence
  Synthetic Sequence
accggctatc

SEQ ID NO: 2423 - DNA, 10 bp, Artificial Sequence
  Synthetic Sequence
ggccgttacg

SEQ ID NO: 2424 - DNA, 10 bp, Artificial Sequence
  Synthetic Sequence
tgcacgggag

SEQ ID NO: 2425 - DNA, 10 bp, Artificial Sequence
  Synthetic Sequence
agtagaaagt

SEQ ID NO: 2426 - DNA, 10 bp, Artificial Sequence
  Synthetic Sequence
atggcgtgca

SEQ ID NO: 2427 - DNA, 10 bp, Artificial Sequence
  Synthetic Sequence
gtagctcaaa

SEQ ID NO: 2428 - DNA, 10 bp, Artificial Sequence
  Synthetic Sequence
cggctgaaag

SEQ ID NO: 2429 - DNA, 10 bp, Artificial Sequence
  Synthetic Sequence
ttaagagtag

SEQ ID NO: 2430 - DNA, 10 bp, Artificial Sequence
  Synthetic Sequence
atgtttaata

SEQ ID NO: 2431 - DNA, 10 bp, Artificial Sequence
  Synthetic Sequence
cgaccgtatc

SEQ ID NO: 2432 - DNA, 10 bp, Artificial Sequence
  Synthetic Sequence
aacctgaacg

SEQ ID NO: 2433 - DNA, 10 bp, Artificial Sequence
  Synthetic Sequence
atatgtgggt

SEQ ID NO: 2434 - DNA, 10 bp, Artificial Sequence
  Synthetic Sequence
tattggcaag

SEQ ID NO: 2435 - DNA, 10 bp, Artificial Sequence
  Synthetic Sequence
aacgattgcc

SEQ ID NO: 2436 - DNA, 10 bp, Artificial Sequence
  Synthetic Sequence
cacgaatgag

SEQ ID NO: 2437 - DNA, 10 bp, Artificial Sequence
  Synthetic Sequence
gtcggcatgg

SEQ ID NO: 2438 - DNA, 10 bp, Artificial Sequence
  Synthetic Sequence
tgattgaggc

SEQ ID NO: 2439 - DNA, 10 bp, Artificial Sequence
  Synthetic Sequence
agagtgattg

SEQ ID NO: 2440 - DNA, 10 bp, Artificial Sequence
  Synthetic Sequence
ttcgtcttga

SEQ ID NO: 2441 - DNA, 10 bp, Artificial Sequence
  Synthetic Sequence
ctgaatttcg

SEQ ID NO: 2442 - DNA, 10 bp, Artificial Sequence
  Synthetic Sequence
ttgatctgcc

SEQ ID NO: 2443 - DNA, 10 bp, Artificial Sequence
  Synthetic Sequence
cattgctaaa

SEQ ID NO: 2444 - DNA, 10 bp, Artificial Sequence
  Synthetic Sequence
gcttcgttca

SEQ ID NO: 2445 - DNA, 10 bp, Artificial Sequence
  Synthetic Sequence
tgagccgttg

SEQ ID NO: 2446 - DNA, 10 bp, Artificial Sequence
  Synthetic Sequence
ttccgacgca

SEQ ID NO: 2447 - DNA, 10 bp, Artificial Sequence
  Synthetic Sequence
taacggttgc

SEQ ID NO: 2448 - DNA, 10 bp, Artificial Sequence
  Synthetic Sequence
gggaccagca

SEQ ID NO: 2449 - DNA, 10 bp, Artificial Sequence
  Synthetic Sequence
ttaatagaac

SEQ ID NO: 2450 - DNA, 10 bp, Artificial Sequence
  Synthetic Sequence
gtcaggaccc

SEQ ID NO: 2451 - DNA, 10 bp, Artificial Sequence
  Synthetic Sequence
gatatataga

SEQ ID NO: 2452 - DNA, 10 bp, Artificial Sequence
  Synthetic Sequence
ctgcgaactg

SEQ ID NO: 2453 - DNA, 10 bp, Artificial Sequence
  Synthetic Sequence
tggcggtagt

SEQ ID NO: 2454 - DNA, 10 bp, Artificial Sequence
  Synthetic Sequence
aactaaggag

SEQ ID NO: 2455 - DNA, 10 bp, Artificial Sequence
  Synthetic Sequence
tcagccctgg

SEQ ID NO: 2456 - DNA, 10 bp, Artificial Sequence
  Synthetic Sequence
cttatacctg

SEQ ID NO: 2457 - DNA, 10 bp, Artificial Sequence
  Synthetic Sequence
atggcaagtt

SEQ ID NO: 2458 - DNA, 10 bp, Artificial Sequence
  Synthetic Sequence
cacaccacgg

SEQ ID NO: 2459 - DNA, 10 bp, Artificial Sequence
  Synthetic Sequence
gaatatcgcg

SEQ ID NO: 2460 - DNA, 10 bp, Artificial Sequence
  Synthetic Sequence
catgtgcgcg

SEQ ID NO: 2461 - DNA, 10 bp, Artificial Sequence
  Synthetic Sequence
caaacttgtt

SEQ ID NO: 2462 - DNA, 10 bp, Artificial Sequence
  Synthetic Sequence
aacccggtct

SEQ ID NO: 2463 - DNA, 10 bp, Artificial Sequence
  Synthetic Sequence
acgttaagtc

SEQ ID NO: 2464 - DNA, 10 bp, Artificial Sequence
  Synthetic Sequence
gatgagggcc

SEQ ID NO: 2465 - DNA, 10 bp, Artificial Sequence
  Synthetic Sequence
cgagacgatg

SEQ ID NO: 2466 - DNA, 10 bp, Artificial Sequence
  Synthetic Sequence
accactggga

SEQ ID NO: 2467 - DNA, 10 bp, Artificial Sequence
  Synthetic Sequence
tggtctcgcg

SEQ ID NO: 2468 - DNA, 10 bp, Artificial Sequence
  Synthetic Sequence
ttgaccacag

SEQ ID NO: 2469 - DNA, 10 bp, Artificial Sequence
  Synthetic Sequence
gcgtattggg

SEQ ID NO: 2470 - DNA, 10 bp, Artificial Sequence
  Synthetic Sequence
gatctcctcc

SEQ ID NO: 2471 - DNA, 10 bp, Artificial Sequence
  Synthetic Sequence
ccgtccacgt

SEQ ID NO: 2472 - DNA, 10 bp, Artificial Sequence
  Synthetic Sequence
taagcgactc

SEQ ID NO: 2473 - DNA, 10 bp, Artificial Sequence
  Synthetic Sequence
gttcggtgtt

SEQ ID NO: 2474 - DNA, 10 bp, Artificial Sequence
  Synthetic Sequence
atttatttgt

SEQ ID NO: 2475 - DNA, 10 bp, Artificial Sequence
  Synthetic Sequence
ccttgaatag

SEQ ID NO: 2476 - DNA, 10 bp, Artificial Sequence
  Synthetic Sequence
gacacccgta

SEQ ID NO: 2477 - DNA, 10 bp, Artificial Sequence
  Synthetic Sequence
cggctcgaaa

SEQ ID NO: 2478 - DNA, 10 bp, Artificial Sequence
  Synthetic Sequence
gaacacattg

SEQ ID NO: 2479 - DNA, 10 bp, Artificial Sequence
  Synthetic Sequence
cgagagatga

SEQ ID NO: 2480 - DNA, 10 bp, Artificial Sequence
  Synthetic Sequence
acgcgatatt

SEQ ID NO: 2481 - DNA, 10 bp, Artificial Sequence
  Synthetic Sequence
catggatttc

SEQ ID NO: 2482 - DNA, 10 bp, Artificial Sequence
  Synthetic Sequence
ccacgtgaca

SEQ ID NO: 2483 - DNA, 10 bp, Artificial Sequence
  Synthetic Sequence
caaagcagca

SEQ ID NO: 2484 - DNA, 10 bp, Artificial Sequence
  Synthetic Sequence
agcgggtttc

SEQ ID NO: 2485 - DNA, 10 bp, Artificial Sequence
  Synthetic Sequence
cgagggtcct

SEQ ID NO: 2486 - DNA, 10 bp, Artificial Sequence
  Synthetic Sequence
ccggtcagtg

SEQ ID NO: 2487 - DNA, 10 bp, Artificial Sequence
  Synthetic Sequence
cctcagagtt

SEQ ID NO: 2488 - DNA, 10 bp, Artificial Sequence
  Synthetic Sequence
agtcgcttga

SEQ ID NO: 2489 - DNA, 10 bp, Artificial Sequence
  Synthetic Sequence
cgagtatggc

SEQ ID NO: 2490 - DNA, 10 bp, Artificial Sequence
  Synthetic Sequence
agcggagaag

SEQ ID NO: 2491 - DNA, 10 bp, Artificial Sequence
  Synthetic Sequence
gtcatgtggc

SEQ ID NO: 2492 - DNA, 10 bp, Artificial Sequence
  Synthetic Sequence
tgtcttgttg

SEQ ID NO: 2493 - DNA, 10 bp, Artificial Sequence
  Synthetic Sequence
gaggcgggtt

SEQ ID NO: 2494 - DNA, 10 bp, Artificial Sequence
  Synthetic Sequence
ggcaggtatg

SEQ ID NO: 2495 - DNA, 10 bp, Artificial Sequence
  Synthetic Sequence
gggctgtgct

SEQ ID NO: 2496 - DNA, 10 bp, Artificial Sequence
  Synthetic Sequence
cgaaattccg

SEQ ID NO: 2497 - DNA, 10 bp, Artificial Sequence
  Synthetic Sequence
gggcatccgt

SEQ ID NO: 2498 - DNA, 10 bp, Artificial Sequence
  Synthetic Sequence
acaatcgtgc

SEQ ID NO: 2499 - DNA, 10 bp, Artificial Sequence
  Synthetic Sequence
tacccaggga

SEQ ID NO: 2500 - DNA, 10 bp, Artificial Sequence
  Synthetic Sequence
ttccgttgga

SEQ ID NO: 2501 - DNA, 10 bp, Artificial Sequence
  Synthetic Sequence
cgaggccata

SEQ ID NO: 2502 - DNA, 10 bp, Artificial Sequence
  Synthetic Sequence
tccgccagca

SEQ ID NO: 2503 - DNA, 10 bp, Artificial Sequence
  Synthetic Sequence
tgagatagga

SEQ ID NO: 2504 - DNA, 10 bp, Artificial Sequence
  Synthetic Sequence
tgaactaaag

SEQ ID NO: 2505 - DNA, 10 bp, Artificial Sequence
  Synthetic Sequence
gaatttaggt

SEQ ID NO: 2506 - DNA, 10 bp, Artificial Sequence
  Synthetic Sequence
ggctcagtgt

SEQ ID NO: 2507 - DNA, 10 bp, Artificial Sequence
  Synthetic Sequence
ggcgaggtga

SEQ ID NO: 2508 - DNA, 10 bp, Artificial Sequence
  Synthetic Sequence
aatgagtatt

SEQ ID NO: 2509 - DNA, 10 bp, Artificial Sequence
  Synthetic Sequence
gacactacaa

SEQ ID NO: 2510 - DNA, 10 bp, Artificial Sequence
  Synthetic Sequence
gcgagtatga

SEQ ID NO: 2511 - DNA, 10 bp, Artificial Sequence
  Synthetic Sequence
acccttgaat

SEQ ID NO: 2512 - DNA, 10 bp, Artificial Sequence
  Synthetic Sequence
ggtagacaat

SEQ ID NO: 2513 - DNA, 10 bp, Artificial Sequence
  Synthetic Sequence
atgcagacgc

SEQ ID NO: 2514 - DNA, 10 bp, Artificial Sequence
  Synthetic Sequence
tgggtgatgg

SEQ ID NO: 2515 - DNA, 10 bp, Artificial Sequence
  Synthetic Sequence
cggacattga

SEQ ID NO: 2516 - DNA, 10 bp, Artificial Sequence
  Synthetic Sequence
taagtacttg

SEQ ID NO: 2517 - DNA, 10 bp, Artificial Sequence
  Synthetic Sequence
tttctcgaat

SEQ ID NO: 2518 - DNA, 10 bp, Artificial Sequence
  Synthetic Sequence
cgagatgtcg

SEQ ID NO: 2519 - DNA, 10 bp, Artificial Sequence
  Synthetic Sequence
gatccttcag

SEQ ID NO: 2520 - DNA, 10 bp, Artificial Sequence
  Synthetic Sequence
ggtttaagaa

SEQ ID NO: 2521 - DNA, 10 bp, Artificial Sequence
  Synthetic Sequence
tcgttggtct

SEQ ID NO: 2522 - DNA, 10 bp, Artificial Sequence
  Synthetic Sequence
gccgtggcta

SEQ ID NO: 2523 - DNA, 10 bp, Artificial Sequence
  Synthetic Sequence
aacttacgac

SEQ ID NO: 2524 - DNA, 10 bp, Artificial Sequence
  Synthetic Sequence
taggcgttga

SEQ ID NO: 2525 - DNA, 10 bp, Artificial Sequence
  Synthetic Sequence
actatctaga

SEQ ID NO: 2526 - DNA, 10 bp, Artificial Sequence
  Synthetic Sequence
tccgtccatc

SEQ ID NO: 2527 - DNA, 10 bp, Artificial Sequence
  Synthetic Sequence
gtggatgtca

SEQ ID NO: 2528 - DNA, 10 bp, Artificial Sequence
  Synthetic Sequence
agactagatt

SEQ ID NO: 2529 - DNA, 10 bp, Artificial Sequence
  Synthetic Sequence
tttacctggg

SEQ ID NO: 2530 - DNA, 10 bp, Artificial Sequence
  Synthetic Sequence
acaacccgcg

SEQ ID NO: 2531 - DNA, 10 bp, Artificial Sequence
  Synthetic Sequence
gtattctgca

SEQ ID NO: 2532 - DNA, 10 bp, Artificial Sequence
  Synthetic Sequence
gcgggtacat

SEQ ID NO: 2533 - DNA, 10 bp, Artificial Sequence
  Synthetic Sequence
aagccagaac

SEQ ID NO: 2534 - DNA, 10 bp, Artificial Sequence
  Synthetic Sequence
tggactataa

SEQ ID NO: 2535 - DNA, 10 bp, Artificial Sequence
  Synthetic Sequence
cactacacac

SEQ ID NO: 2536 - DNA, 10 bp, Artificial Sequence
  Synthetic Sequence
aagccttcgg

SEQ ID NO: 2537 - DNA, 10 bp, Artificial Sequence
  Synthetic Sequence
aatccatggc

SEQ ID NO: 2538 - DNA, 10 bp, Artificial Sequence
  Synthetic Sequence
ctcacaacac

SEQ ID NO: 2539 - DNA, 10 bp, Artificial Sequence
  Synthetic Sequence
ccacggaagg

SEQ ID NO: 2540 - DNA, 10 bp, Artificial Sequence
  Synthetic Sequence
tcaaggcagt

SEQ ID NO: 2541 - DNA, 10 bp, Artificial Sequence
  Synthetic Sequence
gggatggatc

SEQ ID NO: 2542 - DNA, 10 bp, Artificial Sequence
  Synthetic Sequence
agctcatagg

SEQ ID NO: 2543 - DNA, 10 bp, Artificial Sequence
  Synthetic Sequence
gttgccgcca

SEQ ID NO: 2544 - DNA, 10 bp, Artificial Sequence
  Synthetic Sequence
ggatgtacaa

SEQ ID NO: 2545 - DNA, 10 bp, Artificial Sequence
  Synthetic Sequence
gcgttagact

SEQ ID NO: 2546 - DNA, 10 bp, Artificial Sequence
  Synthetic Sequence
ttaaactcat

SEQ ID NO: 2547 - DNA, 10 bp, Artificial Sequence
  Synthetic Sequence
accagggcat

SEQ ID NO: 2548 - DNA, 10 bp, Artificial Sequence
  Synthetic Sequence
gcctcaagga

SEQ ID NO: 2549 - DNA, 10 bp, Artificial Sequence
  Synthetic Sequence
gtttgagtac

SEQ ID NO: 2550 - DNA, 10 bp, Artificial Sequence
  Synthetic Sequence
acagtagtcg

SEQ ID NO: 2551 - DNA, 10 bp, Artificial Sequence
  Synthetic Sequence
tactgcacta

SEQ ID NO: 2552 - DNA, 10 bp, Artificial Sequence
  Synthetic Sequence
gatctacatg

SEQ ID NO: 2553 - DNA, 10 bp, Artificial Sequence
  Synthetic Sequence
gaacagtatt

SEQ ID NO: 2554 - DNA, 10 bp, Artificial Sequence
  Synthetic Sequence
attctgcaat

SEQ ID NO: 2555 - DNA, 10 bp, Artificial Sequence
  Synthetic Sequence
tgccttccgt

SEQ ID NO: 2556 - DNA, 10 bp, Artificial Sequence
  Synthetic Sequence
acttcgatga

SEQ ID NO: 2557 - DNA, 10 bp, Artificial Sequence
  Synthetic Sequence
gcacaccctg

SEQ ID NO: 2558 - DNA, 10 bp, Artificial Sequence
  Synthetic Sequence
ccagagggca

SEQ ID NO: 2559 - DNA, 10 bp, Artificial Sequence
  Synthetic Sequence
tctgcgagag

SEQ ID NO: 2560 - DNA, 10 bp, Artificial Sequence
  Synthetic Sequence
aggttcacgc

SEQ ID NO: 2561 - DNA, 10 bp, Artificial Sequence
  Synthetic Sequence
gcgagctgaa

SEQ ID NO: 2562 - DNA, 10 bp, Artificial Sequence
  Synthetic Sequence
gggagtggtg

SEQ ID NO: 2563 - DNA, 10 bp, Artificial Sequence
  Synthetic Sequence
agatcgacgt

SEQ ID NO: 2564 - DNA, 10 bp, Artificial Sequence
  Synthetic Sequence
taatctctag

SEQ ID NO: 2565 - DNA, 10 bp, Artificial Sequence
  Synthetic Sequence
gcgtcatctg

SEQ ID NO: 2566 - DNA, 10 bp, Artificial Sequence
  Synthetic Sequence
aatagttgtt

SEQ ID NO: 2567 - DNA, 10 bp, Artificial Sequence
  Synthetic Sequence
gaccgtcagc

SEQ ID NO: 2568 - DNA, 10 bp, Artificial Sequence
  Synthetic Sequence
gcagcaagat

SEQ ID NO: 2569 - DNA, 10 bp, Artificial Sequence
  Synthetic Sequence
gatagaggtc

SEQ ID NO: 2570 - DNA, 10 bp, Artificial Sequence
  Synthetic Sequence
tgtatcattt

SEQ ID NO: 2571 - DNA, 10 bp, Artificial Sequence
  Synthetic Sequence
tcgcaattct

SEQ ID NO: 2572 - DNA, 10 bp, Artificial Sequence
  Synthetic Sequence
tttcggagcc

SEQ ID NO: 2573 - DNA, 10 bp, Artificial Sequence
  Synthetic Sequence
aacgcaagcc

SEQ ID NO: 2574 - DNA, 10 bp, Artificial Sequence
  Synthetic Sequence
gtgctttctc

SEQ ID NO: 2575 - DNA, 10 bp, Artificial Sequence
  Synthetic Sequence
tgccaaacct

SEQ ID NO: 2576 - DNA, 10 bp, Artificial Sequence
  Synthetic Sequence
cggccttagt

SEQ ID NO: 2577 - DNA, 10 bp, Artificial Sequence
  Synthetic Sequence
ccactccagc

SEQ ID NO: 2578 - DNA, 10 bp, Artificial Sequence
  Synthetic Sequence
aacccaatgg

SEQ ID NO: 2579 - DNA, 10 bp, Artificial Sequence
  Synthetic Sequence
gacccatgtt

SEQ ID NO: 2580 - DNA, 10 bp, Artificial Sequence
  Synthetic Sequence
ccgggatatg

SEQ ID NO: 2581 - DNA, 10 bp, Artificial Sequence
  Synthetic Sequence
gcgggcagtt

SEQ ID NO: 2582 - DNA, 10 bp, Artificial Sequence
  Synthetic Sequence
agccgataga

SEQ ID NO: 2583 - DNA, 10 bp, Artificial Sequence
  Synthetic Sequence
ggagtctcgt

SEQ ID NO: 2584 - DNA, 10 bp, Artificial Sequence
  Synthetic Sequence
aacgtatagt

SEQ ID NO: 2585 - DNA, 10 bp, Artificial Sequence
  Synthetic Sequence
cacccttata

SEQ ID NO: 2586 - DNA, 10 bp, Artificial Sequence
  Synthetic Sequence
ctagcatctt

SEQ ID NO: 2587 - DNA, 10 bp, Artificial Sequence
  Synthetic Sequence
tgatttagta

SEQ ID NO: 2588 - DNA, 10 bp, Artificial Sequence
  Synthetic Sequence
cgtaatgatc

SEQ ID NO: 2589 - DNA, 10 bp, Artificial Sequence
  Synthetic Sequence
gctgatagtg

SEQ ID NO: 2590 - DNA, 10 bp, Artificial Sequence
  Synthetic Sequence
tccataggcg

SEQ ID NO: 2591 - DNA, 10 bp, Artificial Sequence
  Synthetic Sequence
ccacccaatg

SEQ ID NO: 2592 - DNA, 10 bp, Artificial Sequence
  Synthetic Sequence
tggctcatta

SEQ ID NO: 2593 - DNA, 10 bp, Artificial Sequence
  Synthetic Sequence
acctgagtct

SEQ ID NO: 2594 - DNA, 10 bp, Artificial Sequence
  Synthetic Sequence
ttgaatagaa

SEQ ID NO: 2595 - DNA, 10 bp, Artificial Sequence
  Synthetic Sequence
acgtttgcaa

SEQ ID NO: 2596 - DNA, 10 bp, Artificial Sequence
  Synthetic Sequence
ttcttatcca

SEQ ID NO: 2597 - DNA, 10 bp, Artificial Sequence
  Synthetic Sequence
tttattacca

SEQ ID NO: 2598 - DNA, 10 bp, Artificial Sequence
  Synthetic Sequence
tatctcagtt

SEQ ID NO: 2599 - DNA, 10 bp, Artificial Sequence
  Synthetic Sequence
tgtaactcaa

SEQ ID NO: 2600 - DNA, 10 bp, Artificial Sequence
  Synthetic Sequence
cttctgcaga

SEQ ID NO: 2601 - DNA, 10 bp, Artificial Sequence
  Synthetic Sequence
cgagacatct

SEQ ID NO: 2602 - DNA, 10 bp, Artificial Sequence
  Synthetic Sequence
tttctgaaca

SEQ ID NO: 2603 - DNA, 10 bp, Artificial Sequence
  Synthetic Sequence
tcgtgatgct

SEQ ID NO: 2604 - DNA, 10 bp, Artificial Sequence
  Synthetic Sequence
acggtcgata

SEQ ID NO: 2605 - DNA, 10 bp, Artificial Sequence
  Synthetic Sequence
gtggcagtgt

SEQ ID NO: 2606 - DNA, 10 bp, Artificial Sequence
  Synthetic Sequence
agggcgcagt

SEQ ID NO: 2607 - DNA, 10 bp, Artificial Sequence
  Synthetic Sequence
ccgatctata

SEQ ID NO: 2608 - DNA, 10 bp, Artificial Sequence
  Synthetic Sequence
agctccgcat

SEQ ID NO: 2609 - DNA, 10 bp, Artificial Sequence
  Synthetic Sequence
ctccaaatac

SEQ ID NO: 2610 - DNA, 10 bp, Artificial Sequence
  Synthetic Sequence
gctcacctag

SEQ ID NO: 2611 - DNA, 10 bp, Artificial Sequence
  Synthetic Sequence
tgatatgaaa

SEQ ID NO: 2612 - DNA, 10 bp, Artificial Sequence
  Synthetic Sequence
agtcggctgg

SEQ ID NO: 2613 - DNA, 10 bp, Artificial Sequence
  Synthetic Sequence
cttcctgctg

SEQ ID NO: 2614 - DNA, 10 bp, Artificial Sequence
  Synthetic Sequence
ggctacagac

SEQ ID NO: 2615 - DNA, 10 bp, Artificial Sequence
  Synthetic Sequence
cccaggatgg

SEQ ID NO: 2616 - DNA, 10 bp, Artificial Sequence
  Synthetic Sequence
aggcaacgcg

SEQ ID NO: 2617 - DNA, 10 bp, Artificial Sequence
  Synthetic Sequence
ttaccaatac

SEQ ID NO: 2618 - DNA, 10 bp, Artificial Sequence
  Synthetic Sequence
accgagtttg

SEQ ID NO: 2619 - DNA, 10 bp, Artificial Sequence
  Synthetic Sequence
agttagtctg

SEQ ID NO: 2620 - DNA, 10 bp, Artificial Sequence
  Synthetic Sequence
gacgtcactt

SEQ ID NO: 2621 - DNA, 10 bp, Artificial Sequence
  Synthetic Sequence
ttgctcccat

SEQ ID NO: 2622 - DNA, 10 bp, Artificial Sequence
  Synthetic Sequence
tagagtttct

SEQ ID NO: 2623 - DNA, 10 bp, Artificial Sequence
  Synthetic Sequence
agatatacag

SEQ ID NO: 2624 - DNA, 10 bp, Artificial Sequence
  Synthetic Sequence
ccgacagctc

SEQ ID NO: 2625 - DNA, 10 bp, Artificial Sequence
  Synthetic Sequence
gttactggtc

SEQ ID NO: 2626 - DNA, 10 bp, Artificial Sequence
  Synthetic Sequence
accactacac

SEQ ID NO: 2627 - DNA, 10 bp, Artificial Sequence
  Synthetic Sequence
tgtcaagtca

SEQ ID NO: 2628 - DNA, 10 bp, Artificial Sequence
  Synthetic Sequence
ctcatgggcc

SEQ ID NO: 2629 - DNA, 10 bp, Artificial Sequence
  Synthetic Sequence
gacagcatac

SEQ ID NO: 2630 - DNA, 10 bp, Artificial Sequence
  Synthetic Sequence
ggaagcgagc

SEQ ID NO: 2631 - DNA, 10 bp, Artificial Sequence
  Synthetic Sequence
taccaacggc

SEQ ID NO: 2632 - DNA, 10 bp, Artificial Sequence
  Synthetic Sequence
cttggcattg

SEQ ID NO: 2633 - DNA, 10 bp, Artificial Sequence
  Synthetic Sequence
ctttagcctc

SEQ ID NO: 2634 - DNA, 10 bp, Artificial Sequence
  Synthetic Sequence
gcagaccgat

SEQ ID NO: 2635 - DNA, 10 bp, Artificial Sequence
  Synthetic Sequence
gccctaccct

SEQ ID NO: 2636 - DNA, 10 bp, Artificial Sequence
  Synthetic Sequence
tatcgacaca

SEQ ID NO: 2637 - DNA, 10 bp, Artificial Sequence
  Synthetic Sequence
cttctacgcc

SEQ ID NO: 2638 - DNA, 10 bp, Artificial Sequence
  Synthetic Sequence
gcacagtaga

SEQ ID NO: 2639 - DNA, 10 bp, Artificial Sequence
  Synthetic Sequence
aaacagataa

SEQ ID NO: 2640 - DNA, 10 bp, Artificial Sequence
  Synthetic Sequence
gtagtagtac

SEQ ID NO: 2641 - DNA, 10 bp, Artificial Sequence
  Synthetic Sequence
tgtcgccgat

SEQ ID NO: 2642 - DNA, 10 bp, Artificial Sequence
  Synthetic Sequence
gtgatgacta

SEQ ID NO: 2643 - DNA, 10 bp, Artificial Sequence
  Synthetic Sequence
taaatttgaa

SEQ ID NO: 2644 - DNA, 10 bp, Artificial Sequence
  Synthetic Sequence
acgagattca

SEQ ID NO: 2645 - DNA, 10 bp, Artificial Sequence
  Synthetic Sequence
gtatttccga

SEQ ID NO: 2646 - DNA, 10 bp, Artificial Sequence
  Synthetic Sequence
tattcgcggt

SEQ ID NO: 2647 - DNA, 10 bp, Artificial Sequence
  Synthetic Sequence
accagtcagt

SEQ ID NO: 2648 - DNA, 10 bp, Artificial Sequence
  Synthetic Sequence
gttcgcccta

SEQ ID NO: 2649 - DNA, 10 bp, Artificial Sequence
  Synthetic Sequence
gacactgaag

SEQ ID NO: 2650 - DNA, 10 bp, Artificial Sequence
  Synthetic Sequence
tacgtttacg

SEQ ID NO: 2651 - DNA, 10 bp, Artificial Sequence
  Synthetic Sequence
tgtaagctaa

SEQ ID NO: 2652 - DNA, 10 bp, Artificial Sequence
  Synthetic Sequence
agtacgccta

SEQ ID NO: 2653 - DNA, 10 bp, Artificial Sequence
  Synthetic Sequence
gcattaggca

SEQ ID NO: 2654 - DNA, 10 bp, Artificial Sequence
  Synthetic Sequence
cattaagatg

SEQ ID NO: 2655 - DNA, 10 bp, Artificial Sequence
  Synthetic Sequence
cccgcatgct

SEQ ID NO: 2656 - DNA, 10 bp, Artificial Sequence
  Synthetic Sequence
tgcgatatcc

SEQ ID NO: 2657 - DNA, 10 bp, Artificial Sequence
  Synthetic Sequence
gatactgcat

SEQ ID NO: 2658 - DNA, 10 bp, Artificial Sequence
  Synthetic Sequence
gcgttcccgt

SEQ ID NO: 2659 - DNA, 10 bp, Artificial Sequence
  Synthetic Sequence
gaagtgttca

SEQ ID NO: 2660 - DNA, 10 bp, Artificial Sequence
  Synthetic Sequence
ccgtccgatc

SEQ ID NO: 2661 - DNA, 10 bp, Artificial Sequence
  Synthetic Sequence
aaggttagca

SEQ ID NO: 2662 - DNA, 10 bp, Artificial Sequence
  Synthetic Sequence
caacctataa

SEQ ID NO: 2663 - DNA, 10 bp, Artificial Sequence
  Synthetic Sequence
cctgttggac

SEQ ID NO: 2664 - DNA, 10 bp, Artificial Sequence
  Synthetic Sequence
tgaggagtga

SEQ ID NO: 2665 - DNA, 10 bp, Artificial Sequence
  Synthetic Sequence
atcgtagcaa

SEQ ID NO: 2666 - DNA, 10 bp, Artificial Sequence
  Synthetic Sequence
gaccatatat

SEQ ID NO: 2667 - DNA, 10 bp, Artificial Sequence
  Synthetic Sequence
ctgagggagg

SEQ ID NO: 2668 - DNA, 10 bp, Artificial Sequence
  Synthetic Sequence
acgctttggt

SEQ ID NO: 2669 - DNA, 10 bp, Artificial Sequence
  Synthetic Sequence
gaaaggtcaa

SEQ ID NO: 2670 - DNA, 10 bp, Artificial Sequence
  Synthetic Sequence
cttgaggtag

SEQ ID NO: 2671 - DNA, 10 bp, Artificial Sequence
  Synthetic Sequence
gggtgggaga

SEQ ID NO: 2672 - DNA, 10 bp, Artificial Sequence
  Synthetic Sequence
taccgaagcc

SEQ ID NO: 2673 - DNA, 10 bp, Artificial Sequence
  Synthetic Sequence
tcttaagcac

SEQ ID NO: 2674 - DNA, 10 bp, Artificial Sequence
  Synthetic Sequence
actgagcgga

SEQ ID NO: 2675 - DNA, 10 bp, Artificial Sequence
  Synthetic Sequence
tcggaatggc

SEQ ID NO: 2676 - DNA, 10 bp, Artificial Sequence
  Synthetic Sequence
tcaaagagtt

SEQ ID NO: 2677 - DNA, 10 bp, Artificial Sequence
  Synthetic Sequence
agtcttctct

SEQ ID NO: 2678 - DNA, 10 bp, Artificial Sequence
  Synthetic Sequence
tctcacacca

SEQ ID NO: 2679 - DNA, 10 bp, Artificial Sequence
  Synthetic Sequence
tgaaagtcac

SEQ ID NO: 2680 - DNA, 10 bp, Artificial Sequence
  Synthetic Sequence
agcgctaagt

SEQ ID NO: 2681 - DNA, 10 bp, Artificial Sequence
  Synthetic Sequence
aggtccaaca

SEQ ID NO: 2682 - DNA, 10 bp, Artificial Sequence
  Synthetic Sequence
gacctgtcga

SEQ ID NO: 2683 - DNA, 10 bp, Artificial Sequence
  Synthetic Sequence
acgctagtac

SEQ ID NO: 2684 - DNA, 10 bp, Artificial Sequence
  Synthetic Sequence
ccaggtttgc

SEQ ID NO: 2685 - DNA, 10 bp, Artificial Sequence
  Synthetic Sequence
tggctacctc

SEQ ID NO: 2686 - DNA, 10 bp, Artificial Sequence
  Synthetic Sequence
ccgcagtgtg

SEQ ID NO: 2687 - DNA, 10 bp, Artificial Sequence
  Synthetic Sequence
tacacaacag

SEQ ID NO: 2688 - DNA, 10 bp, Artificial Sequence
  Synthetic Sequence
ttctgtacat

SEQ ID NO: 2689 - DNA, 10 bp, Artificial Sequence
  Synthetic Sequence
gccaatctgt

SEQ ID NO: 2690 - DNA, 10 bp, Artificial Sequence
  Synthetic Sequence
catggcatga

SEQ ID NO: 2691 - DNA, 10 bp, Artificial Sequence
  Synthetic Sequence
ttattaacct

SEQ ID NO: 2692 - DNA, 10 bp, Artificial Sequence
  Synthetic Sequence
ctacgggctg

SEQ ID NO: 2693 - DNA, 10 bp, Artificial Sequence
  Synthetic Sequence
aggatcactg

SEQ ID NO: 2694 - DNA, 10 bp, Artificial Sequence
  Synthetic Sequence
tgtgcagcca

SEQ ID NO: 2695 - DNA, 10 bp, Artificial Sequence
  Synthetic Sequence
ctcttgcgct

SEQ ID NO: 2696 - DNA, 10 bp, Artificial Sequence
  Synthetic Sequence
cagccagagt

SEQ ID NO: 2697 - DNA, 10 bp, Artificial Sequence
  Synthetic Sequence
agccgagcct

SEQ ID NO: 2698 - DNA, 10 bp, Artificial Sequence
  Synthetic Sequence
gcggacaaca

SEQ ID NO: 2699 - DNA, 10 bp, Artificial Sequence
  Synthetic Sequence
acctgacaca

SEQ ID NO: 2700 - DNA, 10 bp, Artificial Sequence
  Synthetic Sequence
gcactattga

SEQ ID NO: 2701 - DNA, 10 bp, Artificial Sequence
  Synthetic Sequence
caaagataca

SEQ ID NO: 2702 - DNA, 10 bp, Artificial Sequence
  Synthetic Sequence
acttacctgt

SEQ ID NO: 2703 - DNA, 10 bp, Artificial Sequence
  Synthetic Sequence
gattattggt

SEQ ID NO: 2704 - DNA, 10 bp, Artificial Sequence
  Synthetic Sequence
atcctcggga

SEQ ID NO: 2705 - DNA, 10 bp, Artificial Sequence
  Synthetic Sequence
cgccactagc

SEQ ID NO: 2706 - DNA, 10 bp, Artificial Sequence
  Synthetic Sequence
taagaacgga

SEQ ID NO: 2707 - DNA, 10 bp, Artificial Sequence
  Synthetic Sequence
cagatttcag

SEQ ID NO: 2708 - DNA, 10 bp, Artificial Sequence
  Synthetic Sequence
catagataat

SEQ ID NO: 2709 - DNA, 10 bp, Artificial Sequence
  Synthetic Sequence
cacacggcac

SEQ ID NO: 2710 - DNA, 10 bp, Artificial Sequence
  Synthetic Sequence
gtatcccgcc

SEQ ID NO: 2711 - DNA, 10 bp, Artificial Sequence
  Synthetic Sequence
atgttcgcat

SEQ ID NO: 2712 - DNA, 10 bp, Artificial Sequence
  Synthetic Sequence
cgaattggga

SEQ ID NO: 2713 - DNA, 10 bp, Artificial Sequence
  Synthetic Sequence
gaagcacctc

SEQ ID NO: 2714 - DNA, 10 bp, Artificial Sequence
  Synthetic Sequence
actgactact

SEQ ID NO: 2715 - DNA, 10 bp, Artificial Sequence
  Synthetic Sequence
tactcgaacc

SEQ ID NO: 2716 - DNA, 10 bp, Artificial Sequence
  Synthetic Sequence
gtgtgctggt

SEQ ID NO: 2717 - DNA, 10 bp, Artificial Sequence
  Synthetic Sequence
agctttctcc

SEQ ID NO: 2718 - DNA, 10 bp, Artificial Sequence
  Synthetic Sequence
ccattattgt

SEQ ID NO: 2719 - DNA, 10 bp, Artificial Sequence
  Synthetic Sequence
attagggaaa

SEQ ID NO: 2720 - DNA, 10 bp, Artificial Sequence
  Synthetic Sequence
ttgagacctt

SEQ ID NO: 2721 - DNA, 10 bp, Artificial Sequence
  Synthetic Sequence
ctgtccgcct

SEQ ID NO: 2722 - DNA, 10 bp, Artificial Sequence
  Synthetic Sequence
atgtctcagg

SEQ ID NO: 2723 - DNA, 10 bp, Artificial Sequence
  Synthetic Sequence
cagtctagga

SEQ ID NO: 2724 - DNA, 10 bp, Artificial Sequence
  Synthetic Sequence
ctgagcggag

SEQ ID NO: 2725 - DNA, 10 bp, Artificial Sequence
  Synthetic Sequence
ctatcagtga

SEQ ID NO: 2726 - DNA, 10 bp, Artificial Sequence
  Synthetic Sequence
cccaatgcgc

SEQ ID NO: 2727 - DNA, 10 bp, Artificial Sequence
  Synthetic Sequence
gcttgcccat

SEQ ID NO: 2728 - DNA, 10 bp, Artificial Sequence
  Synthetic Sequence
agtcaaggag

SEQ ID NO: 2729 - DNA, 10 bp, Artificial Sequence
  Synthetic Sequence
ttcattcagg

SEQ ID NO: 2730 - DNA, 10 bp, Artificial Sequence
  Synthetic Sequence
ggagttgact

SEQ ID NO: 2731 - DNA, 10 bp, Artificial Sequence
  Synthetic Sequence
tcccggcgta

SEQ ID NO: 2732 - DNA, 10 bp, Artificial Sequence
  Synthetic Sequence
cctaacgaag

SEQ ID NO: 2733 - DNA, 10 bp, Artificial Sequence
  Synthetic Sequence
ttccaagcgt

SEQ ID NO: 2734 - DNA, 10 bp, Artificial Sequence
  Synthetic Sequence
atgcagtgta

SEQ ID NO: 2735 - DNA, 10 bp, Artificial Sequence
  Synthetic Sequence
cgtgcgctca

SEQ ID NO: 2736 - DNA, 10 bp, Artificial Sequence
  Synthetic Sequence
ggcgttggtg

SEQ ID NO: 2737 - DNA, 10 bp, Artificial Sequence
  Synthetic Sequence
tagtattgcg

SEQ ID NO: 2738 - DNA, 10 bp, Artificial Sequence
  Synthetic Sequence
ttaccctcaa

SEQ ID NO: 2739 - DNA, 10 bp, Artificial Sequence
  Synthetic Sequence
aggaggccga

SEQ ID NO: 2740 - DNA, 10 bp, Artificial Sequence
  Synthetic Sequence
gatagcttta

SEQ ID NO: 2741 - DNA, 10 bp, Artificial Sequence
  Synthetic Sequence
gggatcggat

SEQ ID NO: 2742 - DNA, 10 bp, Artificial Sequence
  Synthetic Sequence
ataatgcgtt

SEQ ID NO: 2743 - DNA, 10 bp, Artificial Sequence
  Synthetic Sequence
tcctatctag

SEQ ID NO: 2744 - DNA, 10 bp, Artificial Sequence
  Synthetic Sequence
cggactgcca

SEQ ID NO: 2745 - DNA, 10 bp, Artificial Sequence
  Synthetic Sequence
tgtagagaca

SEQ ID NO: 2746 - DNA, 10 bp, Artificial Sequence
  Synthetic Sequence
aaagttaccc

SEQ ID NO: 2747 - DNA, 10 bp, Artificial Sequence
  Synthetic Sequence
cctcaccgtc

SEQ ID NO: 2748 - DNA, 10 bp, Artificial Sequence
  Synthetic Sequence
tgaaggatgg

SEQ ID NO: 2749 - DNA, 10 bp, Artificial Sequence
  Synthetic Sequence
aagtgtgccc

SEQ ID NO: 2750 - DNA, 10 bp, Artificial Sequence
  Synthetic Sequence
tggaggacct

SEQ ID NO: 2751 - DNA, 10 bp, Artificial Sequence
  Synthetic Sequence
gaataggata

SEQ ID NO: 2752 - DNA, 10 bp, Artificial Sequence
  Synthetic Sequence
agcgaggcac

SEQ ID NO: 2753 - DNA, 10 bp, Artificial Sequence
  Synthetic Sequence
ccactttctt

SEQ ID NO: 2754 - DNA, 10 bp, Artificial Sequence
  Synthetic Sequence
gtcctactcg

SEQ ID NO: 2755 - DNA, 10 bp, Artificial Sequence
  Synthetic Sequence
gaagttcggc

SEQ ID NO: 2756 - DNA, 10 bp, Artificial Sequence
  Synthetic Sequence
taagtatgcg

SEQ ID NO: 2757 - DNA, 10 bp, Artificial Sequence
  Synthetic Sequence
gccactcact

SEQ ID NO: 2758 - DNA, 10 bp, Artificial Sequence
  Synthetic Sequence
acggaaggcc

SEQ ID NO: 2759 - DNA, 10 bp, Artificial Sequence
  Synthetic Sequence
ggatagaccc

SEQ ID NO: 2760 - DNA, 10 bp, Artificial Sequence
  Synthetic Sequence
tctctactaa

SEQ ID NO: 2761 - DNA, 10 bp, Artificial Sequence
  Synthetic Sequence
gttgggacga

SEQ ID NO: 2762 - DNA, 10 bp, Artificial Sequence
  Synthetic Sequence
tgggaattac

SEQ ID NO: 2763 - DNA, 10 bp, Artificial Sequence
  Synthetic Sequence
gcggtgactg

SEQ ID NO: 2764 - DNA, 10 bp, Artificial Sequence
  Synthetic Sequence
tccgtgatcc

SEQ ID NO: 2765 - DNA, 10 bp, Artificial Sequence
  Synthetic Sequence
aatcgtagga

SEQ ID NO: 2766 - DNA, 10 bp, Artificial Sequence
  Synthetic Sequence
gaccataacc

SEQ ID NO: 2767 - DNA, 10 bp, Artificial Sequence
  Synthetic Sequence
acaggatcca

SEQ ID NO: 2768 - DNA, 10 bp, Artificial Sequence
  Synthetic Sequence
ctatcaagag

SEQ ID NO: 2769 - DNA, 10 bp, Artificial Sequence
  Synthetic Sequence
ccattccatg

SEQ ID NO: 2770 - DNA, 10 bp, Artificial Sequence
  Synthetic Sequence
ttcagccgat

SEQ ID NO: 2771 - DNA, 10 bp, Artificial Sequence
  Synthetic Sequence
tatatcgaag

SEQ ID NO: 2772 - DNA, 10 bp, Artificial Sequence
  Synthetic Sequence
tttactaatg

SEQ ID NO: 2773 - DNA, 10 bp, Artificial Sequence
  Synthetic Sequence
gtctgaatgt

SEQ ID NO: 2774 - DNA, 10 bp, Artificial Sequence
  Synthetic Sequence
tcatagacta

SEQ ID NO: 2775 - DNA, 10 bp, Artificial Sequence
  Synthetic Sequence
tatggactcg

SEQ ID NO: 2776 - DNA, 10 bp, Artificial Sequence
  Synthetic Sequence
aatgggcttg

SEQ ID NO: 2777 - DNA, 10 bp, Artificial Sequence
  Synthetic Sequence
cgtcaagctg

SEQ ID NO: 2778 - DNA, 10 bp, Artificial Sequence
  Synthetic Sequence
agaggtgtta

SEQ ID NO: 2779 - DNA, 10 bp, Artificial Sequence
  Synthetic Sequence
agggcagctg

SEQ ID NO: 2780 - DNA, 10 bp, Artificial Sequence
  Synthetic Sequence
tggcatccac

SEQ ID NO: 2781 - DNA, 10 bp, Artificial Sequence
  Synthetic Sequence
ttacatcaga

SEQ ID NO: 2782 - DNA, 10 bp, Artificial Sequence
  Synthetic Sequence
ataagaacat

SEQ ID NO: 2783 - DNA, 10 bp, Artificial Sequence
  Synthetic Sequence
atacatggca

SEQ ID NO: 2784 - DNA, 10 bp, Artificial Sequence
  Synthetic Sequence
cagcctgtcc

SEQ ID NO: 2785 - DNA, 10 bp, Artificial Sequence
  Synthetic Sequence
agaaagaggt

SEQ ID NO: 2786 - DNA, 10 bp, Artificial Sequence
  Synthetic Sequence
cagtagagcc

SEQ ID NO: 2787 - DNA, 10 bp, Artificial Sequence
  Synthetic Sequence
gaacagacct

SEQ ID NO: 2788 - DNA, 10 bp, Artificial Sequence
  Synthetic Sequence
atgttaccaa

SEQ ID NO: 2789 - DNA, 10 bp, Artificial Sequence
  Synthetic Sequence
acgatgcaag

SEQ ID NO: 2790 - DNA, 10 bp, Artificial Sequence
  Synthetic Sequence
tcaaaggcgg

SEQ ID NO: 2791 - DNA, 10 bp, Artificial Sequence
  Synthetic Sequence
taggcggacc

SEQ ID NO: 2792 - DNA, 10 bp, Artificial Sequence
  Synthetic Sequence
cggttgcatc

SEQ ID NO: 2793 - DNA, 10 bp, Artificial Sequence
  Synthetic Sequence
gctagagaaa

SEQ ID NO: 2794 - DNA, 10 bp, Artificial Sequence
  Synthetic Sequence
gtatcttgtt

SEQ ID NO: 2795 - DNA, 10 bp, Artificial Sequence
  Synthetic Sequence
gttagcgtct

SEQ ID NO: 2796 - DNA, 10 bp, Artificial Sequence
  Synthetic Sequence
agttcgcaga

SEQ ID NO: 2797 - DNA, 10 bp, Artificial Sequence
  Synthetic Sequence
ggttacttta

SEQ ID NO: 2798 - DNA, 10 bp, Artificial Sequence
  Synthetic Sequence
ggtgatttgt

SEQ ID NO: 2799 - DNA, 10 bp, Artificial Sequence
  Synthetic Sequence
tgagcggaaa

SEQ ID NO: 2800 - DNA, 10 bp, Artificial Sequence
  Synthetic Sequence
gagatttggc

SEQ ID NO: 2801 - DNA, 10 bp, Artificial Sequence
  Synthetic Sequence
tgggacgtct

SEQ ID NO: 2802 - DNA, 10 bp, Artificial Sequence
  Synthetic Sequence
gcccagtggt

SEQ ID NO: 2803 - DNA, 10 bp, Artificial Sequence
  Synthetic Sequence
aaacaacaga

SEQ ID NO: 2804 - DNA, 10 bp, Artificial Sequence
  Synthetic Sequence
gacgttaaag

SEQ ID NO: 2805 - DNA, 10 bp, Artificial Sequence
  Synthetic Sequence
accttgttaa

SEQ ID NO: 2806 - DNA, 10 bp, Artificial Sequence
  Synthetic Sequence
ctctcacttg

SEQ ID NO: 2807 - DNA, 10 bp, Artificial Sequence
  Synthetic Sequence
tacggcaaag

SEQ ID NO: 2808 - DNA, 10 bp, Artificial Sequence
  Synthetic Sequence
gaaggaaacg

SEQ ID NO: 2809 - DNA, 10 bp, Artificial Sequence
  Synthetic Sequence
cgccgtgtgt

SEQ ID NO: 2810 - DNA, 10 bp, Artificial Sequence
  Synthetic Sequence
atacgctcgt

SEQ ID NO: 2811 - DNA, 10 bp, Artificial Sequence
  Synthetic Sequence
agcccggagt

SEQ ID NO: 2812 - DNA, 10 bp, Artificial Sequence
  Synthetic Sequence
tggaatcacc

SEQ ID NO: 2813 - DNA, 10 bp, Artificial Sequence
  Synthetic Sequence
ccattcattt

SEQ ID NO: 2814 - DNA, 10 bp, Artificial Sequence
  Synthetic Sequence
tcttgttcgg

SEQ ID NO: 2815 - DNA, 10 bp, Artificial Sequence
  Synthetic Sequence
attgaaaggt

SEQ ID NO: 2816 - DNA, 10 bp, Artificial Sequence
  Synthetic Sequence
tacaagatat

SEQ ID NO: 2817 - DNA, 10 bp, Artificial Sequence
  Synthetic Sequence
aaacctgttg

SEQ ID NO: 2818 - DNA, 10 bp, Artificial Sequence
  Synthetic Sequence
ccactgcata

SEQ ID NO: 2819 - DNA, 10 bp, Artificial Sequence
  Synthetic Sequence
gaagacacgc

SEQ ID NO: 2820 - DNA, 10 bp, Artificial Sequence
  Synthetic Sequence
cattccggta

SEQ ID NO: 2821 - DNA, 10 bp, Artificial Sequence
  Synthetic Sequence
caattaaaga

SEQ ID NO: 2822 - DNA, 10 bp, Artificial Sequence
  Synthetic Sequence
atcttacaag

SEQ ID NO: 2823 - DNA, 10 bp, Artificial Sequence
  Synthetic Sequence
gagcccactt

SEQ ID NO: 2824 - DNA, 10 bp, Artificial Sequence
  Synthetic Sequence
taatgacaac

SEQ ID NO: 2825 - DNA, 10 bp, Artificial Sequence
  Synthetic Sequence
cgacactact

SEQ ID NO: 2826 - DNA, 10 bp, Artificial Sequence
  Synthetic Sequence
atgggtggtt

SEQ ID NO: 2827 - DNA, 10 bp, Artificial Sequence
  Synthetic Sequence
tactaggtaa

SEQ ID NO: 2828 - DNA, 10 bp, Artificial Sequence
  Synthetic Sequence
gatcgttagt

SEQ ID NO: 2829 - DNA, 10 bp, Artificial Sequence
  Synthetic Sequence
ctaaagcgcc

SEQ ID NO: 2830 - DNA, 10 bp, Artificial Sequence
  Synthetic Sequence
tgtgacattg

SEQ ID NO: 2831 - DNA, 10 bp, Artificial Sequence
  Synthetic Sequence
gattccacta

SEQ ID NO: 2832 - DNA, 10 bp, Artificial Sequence
  Synthetic Sequence
ggaattctgc

SEQ ID NO: 2833 - DNA, 10 bp, Artificial Sequence
  Synthetic Sequence
aagtgaggac

SEQ ID NO: 2834 - DNA, 10 bp, Artificial Sequence
  Synthetic Sequence
gataacgtaa

SEQ ID NO: 2835 - DNA, 10 bp, Artificial Sequence
  Synthetic Sequence
cggcatacct

SEQ ID NO: 2836 - DNA, 10 bp, Artificial Sequence
  Synthetic Sequence
cgcgtcaagt

SEQ ID NO: 2837 - DNA, 10 bp, Artificial Sequence
  Synthetic Sequence
ttcgggcctc

SEQ ID NO: 2838 - DNA, 10 bp, Artificial Sequence
  Synthetic Sequence
ctcgaaagta

SEQ ID NO: 2839 - DNA, 10 bp, Artificial Sequence
  Synthetic Sequence
tctttgctgc

SEQ ID NO: 2840 - DNA, 10 bp, Artificial Sequence
  Synthetic Sequence
aggttgtaat

SEQ ID NO: 2841 - DNA, 10 bp, Artificial Sequence
  Synthetic Sequence
gtcctatgat

SEQ ID NO: 2842 - DNA, 10 bp, Artificial Sequence
  Synthetic Sequence
gatgattata

SEQ ID NO: 2843 - DNA, 10 bp, Artificial Sequence
  Synthetic Sequence
agtcacccgg

SEQ ID NO: 2844 - DNA, 10 bp, Artificial Sequence
  Synthetic Sequence
tcggctagtt

SEQ ID NO: 2845 - DNA, 10 bp, Artificial Sequence
  Synthetic Sequence
gtaaacataa

SEQ ID NO: 2846 - DNA, 10 bp, Artificial Sequence
  Synthetic Sequence
atacgcgaat

SEQ ID NO: 2847 - DNA, 10 bp, Artificial Sequence
  Synthetic Sequence
actgtatctc

SEQ ID NO: 2848 - DNA, 10 bp, Artificial Sequence
  Synthetic Sequence
tcgcagagga

SEQ ID NO: 2849 - DNA, 10 bp, Artificial Sequence
  Synthetic Sequence
tttagcacac

SEQ ID NO: 2850 - DNA, 10 bp, Artificial Sequence
  Synthetic Sequence
tttgttgcta

SEQ ID NO: 2851 - DNA, 10 bp, Artificial Sequence
  Synthetic Sequence
cctcaggtca

SEQ ID NO: 2852 - DNA, 10 bp, Artificial Sequence
  Synthetic Sequence
tatacaggtg

SEQ ID NO: 2853 - DNA, 10 bp, Artificial Sequence
  Synthetic Sequence
gtataaccca

SEQ ID NO: 2854 - DNA, 10 bp, Artificial Sequence
  Synthetic Sequence
cacaaatcca

SEQ ID NO: 2855 - DNA, 10 bp, Artificial Sequence
  Synthetic Sequence
agtctttata

SEQ ID NO: 2856 - DNA, 10 bp, Artificial Sequence
  Synthetic Sequence
ggctggaaca

SEQ ID NO: 2857 - DNA, 10 bp, Artificial Sequence
  Synthetic Sequence
gtaagaagcg

SEQ ID NO: 2858 - DNA, 10 bp, Artificial Sequence
  Synthetic Sequence
ggtttggata

SEQ ID NO: 2859 - DNA, 10 bp, Artificial Sequence
  Synthetic Sequence
gattcttaga

SEQ ID NO: 2860 - DNA, 10 bp, Artificial Sequence
  Synthetic Sequence
atctaagtac

SEQ ID NO: 2861 - DNA, 10 bp, Artificial Sequence
  Synthetic Sequence
aggatctggc

SEQ ID NO: 2862 - DNA, 10 bp, Artificial Sequence
  Synthetic Sequence
cggaagttta

SEQ ID NO: 2863 - DNA, 10 bp, Artificial Sequence
  Synthetic Sequence
aactccgacc

SEQ ID NO: 2864 - DNA, 10 bp, Artificial Sequence
  Synthetic Sequence
tcggccctac

SEQ ID NO: 2865 - DNA, 10 bp, Artificial Sequence
  Synthetic Sequence
gtctttcgcc

SEQ ID NO: 2866 - DNA, 10 bp, Artificial Sequence
  Synthetic Sequence
gctcctaccc

SEQ ID NO: 2867 - DNA, 10 bp, Artificial Sequence
  Synthetic Sequence
gcgagtcaaa

SEQ ID NO: 2868 - DNA, 10 bp, Artificial Sequence
  Synthetic Sequence
tatacttgcg

SEQ ID NO: 2869 - DNA, 10 bp, Artificial Sequence
  Synthetic Sequence
gctatcgtca

SEQ ID NO: 2870 - DNA, 10 bp, Artificial Sequence
  Synthetic Sequence
ggcgattcac

SEQ ID NO: 2871 - DNA, 10 bp, Artificial Sequence
  Synthetic Sequence
attgtattcg

SEQ ID NO: 2872 - DNA, 10 bp, Artificial Sequence
  Synthetic Sequence
taacgctcat

SEQ ID NO: 2873 - DNA, 10 bp, Artificial Sequence
  Synthetic Sequence
gccgctgcaa

SEQ ID NO: 2874 - DNA, 10 bp, Artificial Sequence
  Synthetic Sequence
caactgccac

SEQ ID NO: 2875 - DNA, 10 bp, Artificial Sequence
  Synthetic Sequence
ccctgctgaa

SEQ ID NO: 2876 - DNA, 10 bp, Artificial Sequence
  Synthetic Sequence
gcaatcaacg

SEQ ID NO: 2877 - DNA, 10 bp, Artificial Sequence
  Synthetic Sequence
cacttggcag

SEQ ID NO: 2878 - DNA, 10 bp, Artificial Sequence
  Synthetic Sequence
cgtcgcttac

SEQ ID NO: 2879 - DNA, 10 bp, Artificial Sequence
  Synthetic Sequence
cgcgcatcca

SEQ ID NO: 2880 - DNA, 10 bp, Artificial Sequence
  Synthetic Sequence
ctggtttctt

SEQ ID NO: 2881 - DNA, 10 bp, Artificial Sequence
  Synthetic Sequence
agttacacga

SEQ ID NO: 2882 - DNA, 10 bp, Artificial Sequence
  Synthetic Sequence
tgtgatggcc

SEQ ID NO: 2883 - DNA, 10 bp, Artificial Sequence
  Synthetic Sequence
cactatccgg

SEQ ID NO: 2884 - DNA, 10 bp, Artificial Sequence
  Synthetic Sequence
tattgttaca

SEQ ID NO: 2885 - DNA, 10 bp, Artificial Sequence
  Synthetic Sequence
gaccaaagag

SEQ ID NO: 2886 - DNA, 10 bp, Artificial Sequence
  Synthetic Sequence
catgacttct

SEQ ID NO: 2887 - DNA, 10 bp, Artificial Sequence
  Synthetic Sequence
tggtcaatcc

SEQ ID NO: 2888 - DNA, 10 bp, Artificial Sequence
  Synthetic Sequence
gttgttgtaa

SEQ ID NO: 2889 - DNA, 10 bp, Artificial Sequence
  Synthetic Sequence
ctcagacggg

SEQ ID NO: 2890 - DNA, 10 bp, Artificial Sequence
  Synthetic Sequence
tagctcctgc

SEQ ID NO: 2891 - DNA, 10 bp, Artificial Sequence
  Synthetic Sequence
aagtggcaaa

SEQ ID NO: 2892 - DNA, 10 bp, Artificial Sequence
  Synthetic Sequence
tgggtgggtg

SEQ ID NO: 2893 - DNA, 10 bp, Artificial Sequence
  Synthetic Sequence
gacatattct

SEQ ID NO: 2894 - DNA, 10 bp, Artificial Sequence
  Synthetic Sequence
aaccaagatc

SEQ ID NO: 2895 - DNA, 10 bp, Artificial Sequence
  Synthetic Sequence
ttgttacggt

SEQ ID NO: 2896 - DNA, 10 bp, Artificial Sequence
  Synthetic Sequence
agcgagaact

SEQ ID NO: 2897 - DNA, 10 bp, Artificial Sequence
  Synthetic Sequence
ttcttcctgt

SEQ ID NO: 2898 - DNA, 10 bp, Artificial Sequence
  Synthetic Sequence
gtacgccgtg

SEQ ID NO: 2899 - DNA, 10 bp, Artificial Sequence
  Synthetic Sequence
tagtattcgc

SEQ ID NO: 2900 - DNA, 10 bp, Artificial Sequence
  Synthetic Sequence
gtttaacctt

SEQ ID NO: 2901 - DNA, 10 bp, Artificial Sequence
  Synthetic Sequence
tgtgcgaaat

SEQ ID NO: 2902 - DNA, 10 bp, Artificial Sequence
  Synthetic Sequence
aaatactcta

SEQ ID NO: 2903 - DNA, 10 bp, Artificial Sequence
  Synthetic Sequence
gcaactcggc

SEQ ID NO: 2904 - DNA, 10 bp, Artificial Sequence
  Synthetic Sequence
taataagtta

SEQ ID NO: 2905 - DNA, 10 bp, Artificial Sequence
  Synthetic Sequence
gtcagactct

SEQ ID NO: 2906 - DNA, 10 bp, Artificial Sequence
  Synthetic Sequence
tctcaccacc

SEQ ID NO: 2907 - DNA, 10 bp, Artificial Sequence
  Synthetic Sequence
ggtaagcatc

SEQ ID NO: 2908 - DNA, 10 bp, Artificial Sequence
  Synthetic Sequence
gcggcataga

SEQ ID NO: 2909 - DNA, 10 bp, Artificial Sequence
  Synthetic Sequence
gaaagcggat

SEQ ID NO: 2910 - DNA, 10 bp, Artificial Sequence
  Synthetic Sequence
cgccattcgg

SEQ ID NO: 2911 - DNA, 10 bp, Artificial Sequence
  Synthetic Sequence
ccgagcactc

SEQ ID NO: 2912 - DNA, 10 bp, Artificial Sequence
  Synthetic Sequence
ccggatcctg

SEQ ID NO: 2913 - DNA, 10 bp, Artificial Sequence
  Synthetic Sequence
gccacaacca

SEQ ID NO: 2914 - DNA, 10 bp, Artificial Sequence
  Synthetic Sequence
caatttgttg

SEQ ID NO: 2915 - DNA, 10 bp, Artificial Sequence
  Synthetic Sequence
gtgagtcact

SEQ ID NO: 2916 - DNA, 10 bp, Artificial Sequence
  Synthetic Sequence
tgagggcgaa

SEQ ID NO: 2917 - DNA, 10 bp, Artificial Sequence
  Synthetic Sequence
agtgctgccc

SEQ ID NO: 2918 - DNA, 10 bp, Artificial Sequence
  Synthetic Sequence
acaattcagg

SEQ ID NO: 2919 - DNA, 10 bp, Artificial Sequence
  Synthetic Sequence
tattattatg

SEQ ID NO: 2920 - DNA, 10 bp, Artificial Sequence
  Synthetic Sequence
atagagaagg

SEQ ID NO: 2921 - DNA, 10 bp, Artificial Sequence
  Synthetic Sequence
ttgcgaattt

SEQ ID NO: 2922 - DNA, 10 bp, Artificial Sequence
  Synthetic Sequence
tcctcctgat

SEQ ID NO: 2923 - DNA, 10 bp, Artificial Sequence
  Synthetic Sequence
ctgctttgac

SEQ ID NO: 2924 - DNA, 10 bp, Artificial Sequence
  Synthetic Sequence
gtgtctgccg

SEQ ID NO: 2925 - DNA, 10 bp, Artificial Sequence
  Synthetic Sequence
tccatgctcg

SEQ ID NO: 2926 - DNA, 10 bp, Artificial Sequence
  Synthetic Sequence
tgctctgttt

SEQ ID NO: 2927 - DNA, 10 bp, Artificial Sequence
  Synthetic Sequence
tcctgtgcta

SEQ ID NO: 2928 - DNA, 10 bp, Artificial Sequence
  Synthetic Sequence
ttgcggcctg

SEQ ID NO: 2929 - DNA, 10 bp, Artificial Sequence
  Synthetic Sequence
ttatatcatt

SEQ ID NO: 2930 - DNA, 10 bp, Artificial Sequence
  Synthetic Sequence
cgaccattcg

SEQ ID NO: 2931 - DNA, 10 bp, Artificial Sequence
  Synthetic Sequence
gtctccgtcg

SEQ ID NO: 2932 - DNA, 10 bp, Artificial Sequence
  Synthetic Sequence
ctaaagactc

SEQ ID NO: 2933 - DNA, 10 bp, Artificial Sequence
  Synthetic Sequence
catcggatta

SEQ ID NO: 2934 - DNA, 10 bp, Artificial Sequence
  Synthetic Sequence
tgattattac

SEQ ID NO: 2935 - DNA, 10 bp, Artificial Sequence
  Synthetic Sequence
gagctttgtg

SEQ ID NO: 2936 - DNA, 10 bp, Artificial Sequence
  Synthetic Sequence
aaccggttgg

SEQ ID NO: 2937 - DNA, 10 bp, Artificial Sequence
  Synthetic Sequence
caatggccgg

SEQ ID NO: 2938 - DNA, 10 bp, Artificial Sequence
  Synthetic Sequence
accaacttac

SEQ ID NO: 2939 - DNA, 10 bp, Artificial Sequence
  Synthetic Sequence
ccattgctcg

SEQ ID NO: 2940 - DNA, 10 bp, Artificial Sequence
  Synthetic Sequence
ctcgggaaac

SEQ ID NO: 2941 - DNA, 10 bp, Artificial Sequence
  Synthetic Sequence
gacaacaatg

SEQ ID NO: 2942 - DNA, 10 bp, Artificial Sequence
  Synthetic Sequence
cgaaagctca

SEQ ID NO: 2943 - DNA, 10 bp, Artificial Sequence
  Synthetic Sequence
taagctatga

SEQ ID NO: 2944 - DNA, 10 bp, Artificial Sequence
  Synthetic Sequence
acagtcatga

SEQ ID NO: 2945 - DNA, 10 bp, Artificial Sequence
  Synthetic Sequence
actgcgaaca

SEQ ID NO: 2946 - DNA, 10 bp, Artificial Sequence
  Synthetic Sequence
gaaaggcctg

SEQ ID NO: 2947 - DNA, 10 bp, Artificial Sequence
  Synthetic Sequence
tttccttcgg

SEQ ID NO: 2948 - DNA, 10 bp, Artificial Sequence
  Synthetic Sequence
ttattatctc

SEQ ID NO: 2949 - DNA, 10 bp, Artificial Sequence
  Synthetic Sequence
ggattcatta

SEQ ID NO: 2950 - DNA, 10 bp, Artificial Sequence
  Synthetic Sequence
atgaatacag

SEQ ID NO: 2951 - DNA, 10 bp, Artificial Sequence
  Synthetic Sequence
caggagtttg

SEQ ID NO: 2952 - DNA, 10 bp, Artificial Sequence
  Synthetic Sequence
tagaaagctg

SEQ ID NO: 2953 - DNA, 10 bp, Artificial Sequence
  Synthetic Sequence
ctaccttcac

SEQ ID NO: 2954 - DNA, 10 bp, Artificial Sequence
  Synthetic Sequence
tttggctctg

SEQ ID NO: 2955 - DNA, 10 bp, Artificial Sequence
  Synthetic Sequence
agtctgttgc

SEQ ID NO: 2956 - DNA, 10 bp, Artificial Sequence
  Synthetic Sequence
ttactaactg

SEQ ID NO: 2957 - DNA, 10 bp, Artificial Sequence
  Synthetic Sequence
tatgatggag

SEQ ID NO: 2958 - DNA, 10 bp, Artificial Sequence
  Synthetic Sequence
aaacggattg

SEQ ID NO: 2959 - DNA, 10 bp, Artificial Sequence
  Synthetic Sequence
cctgctttcc

SEQ ID NO: 2960 - DNA, 10 bp, Artificial Sequence
  Synthetic Sequence
cgccgaacag

SEQ ID NO: 2961 - DNA, 10 bp, Artificial Sequence
  Synthetic Sequence
gggattacaa

SEQ ID NO: 2962 - DNA, 10 bp, Artificial Sequence
  Synthetic Sequence
taatgggcgt

SEQ ID NO: 2963 - DNA, 10 bp, Artificial Sequence
  Synthetic Sequence
ctggctacgc

SEQ ID NO: 2964 - DNA, 10 bp, Artificial Sequence
  Synthetic Sequence
accgtaagca

SEQ ID NO: 2965 - DNA, 10 bp, Artificial Sequence
  Synthetic Sequence
ctttaatatt

SEQ ID NO: 2966 - DNA, 10 bp, Artificial Sequence
  Synthetic Sequence
ggcactaaat

SEQ ID NO: 2967 - DNA, 10 bp, Artificial Sequence
  Synthetic Sequence
ttcctgttgt

SEQ ID NO: 2968 - DNA, 10 bp, Artificial Sequence
  Synthetic Sequence
tgcccattag

SEQ ID NO: 2969 - DNA, 10 bp, Artificial Sequence
  Synthetic Sequence
actaaccttc

SEQ ID NO: 2970 - DNA, 10 bp, Artificial Sequence
  Synthetic Sequence
gaagtgccgt

SEQ ID NO: 2971 - DNA, 10 bp, Artificial Sequence
  Synthetic Sequence
gaaccgggca

SEQ ID NO: 2972 - DNA, 10 bp, Artificial Sequence
  Synthetic Sequence
cttctatcaa

SEQ ID NO: 2973 - DNA, 10 bp, Artificial Sequence
  Synthetic Sequence
cttaggagga

SEQ ID NO: 2974 - DNA, 10 bp, Artificial Sequence
  Synthetic Sequence
gactcgacgt

SEQ ID NO: 2975 - DNA, 10 bp, Artificial Sequence
  Synthetic Sequence
tcttgctcac

SEQ ID NO: 2976 - DNA, 10 bp, Artificial Sequence
  Synthetic Sequence
ggtcagtttg

SEQ ID NO: 2977 - DNA, 10 bp, Artificial Sequence
  Synthetic Sequence
atgtgaaaga

SEQ ID NO: 2978 - DNA, 10 bp, Artificial Sequence
  Synthetic Sequence
gcacggtacc

SEQ ID NO: 2979 - DNA, 10 bp, Artificial Sequence
  Synthetic Sequence
agtgatcatg

SEQ ID NO: 2980 - DNA, 10 bp, Artificial Sequence
  Synthetic Sequence
ctataccact

SEQ ID NO: 2981 - DNA, 10 bp, Artificial Sequence
  Synthetic Sequence
tgcggaacga

SEQ ID NO: 2982 - DNA, 10 bp, Artificial Sequence
  Synthetic Sequence
gttatcaagt

SEQ ID NO: 2983 - DNA, 10 bp, Artificial Sequence
  Synthetic Sequence
ttagcgagga

SEQ ID NO: 2984 - DNA, 10 bp, Artificial Sequence
  Synthetic Sequence
gtgccactgc

SEQ ID NO: 2985 - DNA, 10 bp, Artificial Sequence
  Synthetic Sequence
gggtaggcat

SEQ ID NO: 2986 - DNA, 10 bp, Artificial Sequence
  Synthetic Sequence
acgcgcactt

SEQ ID NO: 2987 - DNA, 10 bp, Artificial Sequence
  Synthetic Sequence
atggccaata

SEQ ID NO: 2988 - DNA, 10 bp, Artificial Sequence
  Synthetic Sequence
cgtctcgttt

SEQ ID NO: 2989 - DNA, 10 bp, Artificial Sequence
  Synthetic Sequence
ggttcaaagc

SEQ ID NO: 2990 - DNA, 10 bp, Artificial Sequence
  Synthetic Sequence
acgagtgctg

SEQ ID NO: 2991 - DNA, 10 bp, Artificial Sequence
  Synthetic Sequence
ctgtcggata

SEQ ID NO: 2992 - DNA, 10 bp, Artificial Sequence
  Synthetic Sequence
ccctaagatc

SEQ ID NO: 2993 - DNA, 10 bp, Artificial Sequence
  Synthetic Sequence
gtaaacctgc

SEQ ID NO: 2994 - DNA, 10 bp, Artificial Sequence
  Synthetic Sequence
gtgtcaagaa

SEQ ID NO: 2995 - DNA, 10 bp, Artificial Sequence
  Synthetic Sequence
tacggagcta

SEQ ID NO: 2996 - DNA, 10 bp, Artificial Sequence
  Synthetic Sequence
cttatgtgag

SEQ ID NO: 2997 - DNA, 10 bp, Artificial Sequence
  Synthetic Sequence
gacgggaagc

SEQ ID NO: 2998 - DNA, 10 bp, Artificial Sequence
  Synthetic Sequence
tatactatta

SEQ ID NO: 2999 - DNA, 10 bp, Artificial Sequence
  Synthetic Sequence
actagcctct

SEQ ID NO: 3000 - DNA, 10 bp, Artificial Sequence
  Synthetic Sequence
aacttccggt

SEQ ID NO: 3001 - DNA, 10 bp, Artificial Sequence
  Synthetic Sequence
gtccaccttg

SEQ ID NO: 3002 - DNA, 10 bp, Artificial Sequence
  Synthetic Sequence
tgtttcactc

SEQ ID NO: 3003 - DNA, 10 bp, Artificial Sequence
  Synthetic Sequence
ttggtgaggc

SEQ ID NO: 3004 - DNA, 10 bp, Artificial Sequence
  Synthetic Sequence
acctccctag

SEQ ID NO: 3005 - DNA, 10 bp, Artificial Sequence
  Synthetic Sequence
tccgtctaaa

SEQ ID NO: 3006 - DNA, 10 bp, Artificial Sequence
  Synthetic Sequence
ggcgcactta

SEQ ID NO: 3007 - DNA, 10 bp, Artificial Sequence
  Synthetic Sequence
ccttgctctt

SEQ ID NO: 3008 - DNA, 10 bp, Artificial Sequence
  Synthetic Sequence
tgcgagggaa

SEQ ID NO: 3009 - DNA, 10 bp, Artificial Sequence
  Synthetic Sequence
aatttcgcgc

SEQ ID NO: 3010 - DNA, 10 bp, Artificial Sequence
  Synthetic Sequence
tcatcgatcc

SEQ ID NO: 3011 - DNA, 10 bp, Artificial Sequence
  Synthetic Sequence
caacatagga

SEQ ID NO: 3012 - DNA, 10 bp, Artificial Sequence
  Synthetic Sequence
tccaagtgtg

SEQ ID NO: 3013 - DNA, 10 bp, Artificial Sequence
  Synthetic Sequence
aggaggcact

SEQ ID NO: 3014 - DNA, 10 bp, Artificial Sequence
  Synthetic Sequence
tcgacgacga

SEQ ID NO: 3015 - DNA, 10 bp, Artificial Sequence
  Synthetic Sequence
tctaacgttg

SEQ ID NO: 3016 - DNA, 10 bp, Artificial Sequence
  Synthetic Sequence
gtacaatcaa

SEQ ID NO: 3017 - DNA, 10 bp, Artificial Sequence
  Synthetic Sequence
tatacgacac

SEQ ID NO: 3018 - DNA, 10 bp, Artificial Sequence
  Synthetic Sequence
gcgaacgatg

SEQ ID NO: 3019 - DNA, 10 bp, Artificial Sequence
  Synthetic Sequence
cgccaagtct

SEQ ID NO: 3020 - DNA, 10 bp, Artificial Sequence
  Synthetic Sequence
gtgcatagca

SEQ ID NO: 3021 - DNA, 10 bp, Artificial Sequence
  Synthetic Sequence
cggatagcgg

SEQ ID NO: 3022 - DNA, 10 bp, Artificial Sequence
  Synthetic Sequence
tttaaagcaa

SEQ ID NO: 3023 - DNA, 10 bp, Artificial Sequence
  Synthetic Sequence
ctcatcattc

SEQ ID NO: 3024 - DNA, 10 bp, Artificial Sequence
  Synthetic Sequence
gccggacatc

SEQ ID NO: 3025 - DNA, 10 bp, Artificial Sequence
  Synthetic Sequence
cactttcagc

SEQ ID NO: 3026 - DNA, 10 bp, Artificial Sequence
  Synthetic Sequence
atgtcatagc

SEQ ID NO: 3027 - DNA, 10 bp, Artificial Sequence
  Synthetic Sequence
ctagcgcctc

SEQ ID NO: 3028 - DNA, 10 bp, Artificial Sequence
  Synthetic Sequence
tagtaagcgt

SEQ ID NO: 3029 - DNA, 10 bp, Artificial Sequence
  Synthetic Sequence
tccacgtggt

SEQ ID NO: 3030 - DNA, 10 bp, Artificial Sequence
  Synthetic Sequence
ttacaattcg

SEQ ID NO: 3031 - DNA, 10 bp, Artificial Sequence
  Synthetic Sequence
catgtaacag

SEQ ID NO: 3032 - DNA, 10 bp, Artificial Sequence
  Synthetic Sequence
ccaagaccgt

SEQ ID NO: 3033 - DNA, 10 bp, Artificial Sequence
  Synthetic Sequence
caagtgtttc

SEQ ID NO: 3034 - DNA, 10 bp, Artificial Sequence
  Synthetic Sequence
ggagaaccgc

SEQ ID NO: 3035 - DNA, 10 bp, Artificial Sequence
  Synthetic Sequence
agtgctttac

SEQ ID NO: 3036 - DNA, 10 bp, Artificial Sequence
  Synthetic Sequence
tttcttggtc

SEQ ID NO: 3037 - DNA, 10 bp, Artificial Sequence
  Synthetic Sequence
tggagaccca

SEQ ID NO: 3038 - DNA, 10 bp, Artificial Sequence
  Synthetic Sequence
ggctagcacc

SEQ ID NO: 3039 - DNA, 10 bp, Artificial Sequence
  Synthetic Sequence
cgcacttcta

SEQ ID NO: 3040 - DNA, 10 bp, Artificial Sequence
  Synthetic Sequence
tcagacaacg

SEQ ID NO: 3041 - DNA, 10 bp, Artificial Sequence
  Synthetic Sequence
gcactctgcg

SEQ ID NO: 3042 - DNA, 10 bp, Artificial Sequence
  Synthetic Sequence
gctcgacctt

SEQ ID NO: 3043 - DNA, 10 bp, Artificial Sequence
  Synthetic Sequence
tgattgcctc

SEQ ID NO: 3044 - DNA, 10 bp, Artificial Sequence
  Synthetic Sequence
cggacgaagg

SEQ ID NO: 3045 - DNA, 10 bp, Artificial Sequence
  Synthetic Sequence
atccaatcat

SEQ ID NO: 3046 - DNA, 10 bp, Artificial Sequence
  Synthetic Sequence
tactaactac

SEQ ID NO: 3047 - DNA, 10 bp, Artificial Sequence
  Synthetic Sequence
acagcagaat

SEQ ID NO: 3048 - DNA, 10 bp, Artificial Sequence
  Synthetic Sequence
gcaggccaga

SEQ ID NO: 3049 - DNA, 10 bp, Artificial Sequence
  Synthetic Sequence
tcatgtcctt

SEQ ID NO: 3050 - DNA, 10 bp, Artificial Sequence
  Synthetic Sequence
ctaagcgagt

SEQ ID NO: 3051 - DNA, 10 bp, Artificial Sequence
  Synthetic Sequence
gttcatgagt

SEQ ID NO: 3052 - DNA, 10 bp, Artificial Sequence
  Synthetic Sequence
taggacgacg

SEQ ID NO: 3053 - DNA, 10 bp, Artificial Sequence
  Synthetic Sequence
cccttgagtc

SEQ ID NO: 3054 - DNA, 10 bp, Artificial Sequence
  Synthetic Sequence
gcaagaaatc

SEQ ID NO: 3055 - DNA, 10 bp, Artificial Sequence
  Synthetic Sequence
tatctcgaga

SEQ ID NO: 3056 - DNA, 10 bp, Artificial Sequence
  Synthetic Sequence
ttgatacacc

SEQ ID NO: 3057 - DNA, 10 bp, Artificial Sequence
  Synthetic Sequence
acttgacgtt

SEQ ID NO: 3058 - DNA, 10 bp, Artificial Sequence
  Synthetic Sequence
ggactcaaag

SEQ ID NO: 3059 - DNA, 10 bp, Artificial Sequence
  Synthetic Sequence
gtcagtgcct

SEQ ID NO: 3060 - DNA, 10 bp, Artificial Sequence
  Synthetic Sequence
ttctgaactg

SEQ ID NO: 3061 - DNA, 10 bp, Artificial Sequence
  Synthetic Sequence
gatcactcct

SEQ ID NO: 3062 - DNA, 10 bp, Artificial Sequence
  Synthetic Sequence
ggtgggatat

SEQ ID NO: 3063 - DNA, 10 bp, Artificial Sequence
  Synthetic Sequence
cgtgaggagc

SEQ ID NO: 3064 - DNA, 10 bp, Artificial Sequence
  Synthetic Sequence
tctaatcgcc

SEQ ID NO: 3065 - DNA, 10 bp, Artificial Sequence
  Synthetic Sequence
ggcgttctag

SEQ ID NO: 3066 - DNA, 10 bp, Artificial Sequence
  Synthetic Sequence
atttcatctc

SEQ ID NO: 3067 - DNA, 10 bp, Artificial Sequence
  Synthetic Sequence
tacccgccct

SEQ ID NO: 3068 - DNA, 10 bp, Artificial Sequence
  Synthetic Sequence
gggtaacata

SEQ ID NO: 3069 - DNA, 10 bp, Artificial Sequence
  Synthetic Sequence
atctcctaat

SEQ ID NO: 3070 - DNA, 10 bp, Artificial Sequence
  Synthetic Sequence
gcactgggac

SEQ ID NO: 3071 - DNA, 10 bp, Artificial Sequence
  Synthetic Sequence
ttcgcatcga

SEQ ID NO: 3072 - DNA, 10 bp, Artificial Sequence
  Synthetic Sequence
atgcggttcg

SEQ ID NO: 3073 - DNA, 10 bp, Artificial Sequence
  Synthetic Sequence
caacagtgcc

SEQ ID NO: 3074 - DNA, 10 bp, Artificial Sequence
  Synthetic Sequence
gtcacgatct

SEQ ID NO: 3075 - DNA, 10 bp, Artificial Sequence
  Synthetic Sequence
ccgctaccga

SEQ ID NO: 3076 - DNA, 10 bp, Artificial Sequence
  Synthetic Sequence
gacaatgtcg

SEQ ID NO: 3077 - DNA, 10 bp, Artificial Sequence
  Synthetic Sequence
ttgggaaagg

SEQ ID NO: 3078 - DNA, 10 bp, Artificial Sequence
  Synthetic Sequence
gacgcgcctt

SEQ ID NO: 3079 - DNA, 10 bp, Artificial Sequence
  Synthetic Sequence
ctcgtgccag

SEQ ID NO: 3080 - DNA, 10 bp, Artificial Sequence
  Synthetic Sequence
gcgtacttaa

SEQ ID NO: 3081 - DNA, 10 bp, Artificial Sequence
  Synthetic Sequence
ctcttagaaa

SEQ ID NO: 3082 - DNA, 10 bp, Artificial Sequence
  Synthetic Sequence
acgtagcctc

SEQ ID NO: 3083 - DNA, 10 bp, Artificial Sequence
  Synthetic Sequence
acgatcagac

SEQ ID NO: 3084 - DNA, 10 bp, Artificial Sequence
  Synthetic Sequence
gcacgaagac

SEQ ID NO: 3085 - DNA, 10 bp, Artificial Sequence
  Synthetic Sequence
agctcattac

SEQ ID NO: 3086 - DNA, 10 bp, Artificial Sequence
  Synthetic Sequence
gatgcgtacg

SEQ ID NO: 3087 - DNA, 10 bp, Artificial Sequence
  Synthetic Sequence
ttgcatattc

SEQ ID NO: 3088 - DNA, 10 bp, Artificial Sequence
  Synthetic Sequence
tgtagagggc

SEQ ID NO: 3089 - DNA, 10 bp, Artificial Sequence
  Synthetic Sequence
atactcgcaa

SEQ ID NO: 3090 - DNA, 10 bp, Artificial Sequence
  Synthetic Sequence
gtaagatctt

SEQ ID NO: 3091 - DNA, 10 bp, Artificial Sequence
  Synthetic Sequence
agatagccgg

SEQ ID NO: 3092 - DNA, 10 bp, Artificial Sequence
  Synthetic Sequence
agcggatatt

SEQ ID NO: 3093 - DNA, 10 bp, Artificial Sequence
  Synthetic Sequence
taagtcgatt

SEQ ID NO: 3094 - DNA, 10 bp, Artificial Sequence
  Synthetic Sequence
aggcgaagca

SEQ ID NO: 3095 - DNA, 10 bp, Artificial Sequence
  Synthetic Sequence
ttgctcgagg

SEQ ID NO: 3096 - DNA, 10 bp, Artificial Sequence
  Synthetic Sequence
agctgcgggt

SEQ ID NO: 3097 - DNA, 10 bp, Artificial Sequence
  Synthetic Sequence
cgttcctatc

SEQ ID NO: 3098 - DNA, 10 bp, Artificial Sequence
  Synthetic Sequence
catgcgctgt

SEQ ID NO: 3099 - DNA, 10 bp, Artificial Sequence
  Synthetic Sequence
cttcggatag

SEQ ID NO: 3100 - DNA, 10 bp, Artificial Sequence
  Synthetic Sequence
aaagtaacgt

SEQ ID NO: 3101 - DNA, 10 bp, Artificial Sequence
  Synthetic Sequence
acggttggag

SEQ ID NO: 3102 - DNA, 10 bp, Artificial Sequence
  Synthetic Sequence
agccggtgat

SEQ ID NO: 3103 - DNA, 10 bp, Artificial Sequence
  Synthetic Sequence
agcccaaccc

SEQ ID NO: 3104 - DNA, 10 bp, Artificial Sequence
  Synthetic Sequence
ggttattatt

SEQ ID NO: 3105 - DNA, 10 bp, Artificial Sequence
  Synthetic Sequence
tgtatatagc

SEQ ID NO: 3106 - DNA, 10 bp, Artificial Sequence
  Synthetic Sequence
acttgtggcg

SEQ ID NO: 3107 - DNA, 10 bp, Artificial Sequence
  Synthetic Sequence
tgatcaagcg

SEQ ID NO: 3108 - DNA, 10 bp, Artificial Sequence
  Synthetic Sequence
taacggccca

SEQ ID NO: 3109 - DNA, 10 bp, Artificial Sequence
  Synthetic Sequence
tccttacccg

SEQ ID NO: 3110 - DNA, 10 bp, Artificial Sequence
  Synthetic Sequence
atcagtgaac

SEQ ID NO: 3111 - DNA, 10 bp, Artificial Sequence
  Synthetic Sequence
cacgtcgtac

SEQ ID NO: 3112 - DNA, 10 bp, Artificial Sequence
  Synthetic Sequence
agataccaaa

SEQ ID NO: 3113 - DNA, 10 bp, Artificial Sequence
  Synthetic Sequence
atataggagc

SEQ ID NO: 3114 - DNA, 10 bp, Artificial Sequence
  Synthetic Sequence
caaagtaatt

SEQ ID NO: 3115 - DNA, 10 bp, Artificial Sequence
  Synthetic Sequence
gagtatctac

SEQ ID NO: 3116 - DNA, 10 bp, Artificial Sequence
  Synthetic Sequence
atcaagagtc

SEQ ID NO: 3117 - DNA, 10 bp, Artificial Sequence
  Synthetic Sequence
gtccgcagga

SEQ ID NO: 3118 - DNA, 10 bp, Artificial Sequence
  Synthetic Sequence
aaaggagttg

SEQ ID NO: 3119 - DNA, 10 bp, Artificial Sequence
  Synthetic Sequence
gcataactat

SEQ ID NO: 3120 - DNA, 10 bp, Artificial Sequence
  Synthetic Sequence
tagagaaact

SEQ ID NO: 3121 - DNA, 10 bp, Artificial Sequence
  Synthetic Sequence
agaatagggt

SEQ ID NO: 3122 - DNA, 10 bp, Artificial Sequence
  Synthetic Sequence
gtacatctct

SEQ ID NO: 3123 - DNA, 10 bp, Artificial Sequence
  Synthetic Sequence
gaggatactt

SEQ ID NO: 3124 - DNA, 10 bp, Artificial Sequence
  Synthetic Sequence
gtaaactacc

SEQ ID NO: 3125 - DNA, 10 bp, Artificial Sequence
  Synthetic Sequence
caacgcaact

SEQ ID NO: 3126 - DNA, 10 bp, Artificial Sequence
  Synthetic Sequence
ccaagacgag

SEQ ID NO: 3127 - DNA, 10 bp, Artificial Sequence
  Synthetic Sequence
atggatcgca

SEQ ID NO: 3128 - DNA, 10 bp, Artificial Sequence
  Synthetic Sequence
cgtcgcaatt

SEQ ID NO: 3129 - DNA, 10 bp, Artificial Sequence
  Synthetic Sequence
gccggtttaa

SEQ ID NO: 3130 - DNA, 10 bp, Artificial Sequence
  Synthetic Sequence
agacactcgc

SEQ ID NO: 3131 - DNA, 10 bp, Artificial Sequence
  Synthetic Sequence
gatgctaaca

SEQ ID NO: 3132 - DNA, 10 bp, Artificial Sequence
  Synthetic Sequence
ccagtcgtca

SEQ ID NO: 3133 - DNA, 10 bp, Artificial Sequence
  Synthetic Sequence
tgccgcagtg

SEQ ID NO: 3134 - DNA, 10 bp, Artificial Sequence
  Synthetic Sequence
acatttccca

SEQ ID NO: 3135 - DNA, 10 bp, Artificial Sequence
  Synthetic Sequence
gtgtggtaca

SEQ ID NO: 3136 - DNA, 10 bp, Artificial Sequence
  Synthetic Sequence
ctaagttatc

SEQ ID NO: 3137 - DNA, 10 bp, Artificial Sequence
  Synthetic Sequence
attaccttag

SEQ ID NO: 3138 - DNA, 10 bp, Artificial Sequence
  Synthetic Sequence
cactatagct

SEQ ID NO: 3139 - DNA, 10 bp, Artificial Sequence
  Synthetic Sequence
gcgagagttc

SEQ ID NO: 3140 - DNA, 10 bp, Artificial Sequence
  Synthetic Sequence
acctagggct

SEQ ID NO: 3141 - DNA, 10 bp, Artificial Sequence
  Synthetic Sequence
ttgttagccg

SEQ ID NO: 3142 - DNA, 10 bp, Artificial Sequence
  Synthetic Sequence
tgtgggtggt

SEQ ID NO: 3143 - DNA, 10 bp, Artificial Sequence
  Synthetic Sequence
gtggcacctt

SEQ ID NO: 3144 - DNA, 10 bp, Artificial Sequence
  Synthetic Sequence
cgggtgttgc

SEQ ID NO: 3145 - DNA, 10 bp, Artificial Sequence
  Synthetic Sequence
tatctaccct

SEQ ID NO: 3146 - DNA, 10 bp, Artificial Sequence
  Synthetic Sequence
ctaatagtgt

SEQ ID NO: 3147 - DNA, 10 bp, Artificial Sequence
  Synthetic Sequence
gtgccacaaa

SEQ ID NO: 3148 - DNA, 10 bp, Artificial Sequence
  Synthetic Sequence
gcgcgtctag

SEQ ID NO: 3149 - DNA, 10 bp, Artificial Sequence
  Synthetic Sequence
ttccgagccg

SEQ ID NO: 3150 - DNA, 10 bp, Artificial Sequence
  Synthetic Sequence
agaatgcggc

SEQ ID NO: 3151 - DNA, 10 bp, Artificial Sequence
  Synthetic Sequence
cctggatgac

SEQ ID NO: 3152 - DNA, 10 bp, Artificial Sequence
  Synthetic Sequence
tgaaccctat

SEQ ID NO: 3153 - DNA, 10 bp, Artificial Sequence
  Synthetic Sequence
actctcaacg

SEQ ID NO: 3154 - DNA, 10 bp, Artificial Sequence
  Synthetic Sequence
cctgcttgta

SEQ ID NO: 3155 - DNA, 10 bp, Artificial Sequence
  Synthetic Sequence
cctgcgcaat

SEQ ID NO: 3156 - DNA, 10 bp, Artificial Sequence
  Synthetic Sequence
tggtacagtt

SEQ ID NO: 3157 - DNA, 10 bp, Artificial Sequence
  Synthetic Sequence
gtttcccacg

SEQ ID NO: 3158 - DNA, 10 bp, Artificial Sequence
  Synthetic Sequence
gatctatcgt

SEQ ID NO: 3159 - DNA, 10 bp, Artificial Sequence
  Synthetic Sequence
ctactaaatc

SEQ ID NO: 3160 - DNA, 10 bp, Artificial Sequence
  Synthetic Sequence
cccgtgtcac

SEQ ID NO: 3161 - DNA, 10 bp, Artificial Sequence
  Synthetic Sequence
cgagtgccca

SEQ ID NO: 3162 - DNA, 10 bp, Artificial Sequence
  Synthetic Sequence
ctcctgaggt

SEQ ID NO: 3163 - DNA, 10 bp, Artificial Sequence
  Synthetic Sequence
ttccatttag

SEQ ID NO: 3164 - DNA, 10 bp, Artificial Sequence
  Synthetic Sequence
gaaggtcatg

SEQ ID NO: 3165 - DNA, 10 bp, Artificial Sequence
  Synthetic Sequence
taccggtctt

SEQ ID NO: 3166 - DNA, 10 bp, Artificial Sequence
  Synthetic Sequence
catttccgac

SEQ ID NO: 3167 - DNA, 10 bp, Artificial Sequence
  Synthetic Sequence
aattgggaat

SEQ ID NO: 3168 - DNA, 10 bp, Artificial Sequence
  Synthetic Sequence
ctatttgaat

SEQ ID NO: 3169 - DNA, 10 bp, Artificial Sequence
  Synthetic Sequence
cgggacaaag

SEQ ID NO: 3170 - DNA, 10 bp, Artificial Sequence
  Synthetic Sequence
taccattaac

SEQ ID NO: 3171 - DNA, 10 bp, Artificial Sequence
  Synthetic Sequence
ggaatacata

SEQ ID NO: 3172 - DNA, 10 bp, Artificial Sequence
  Synthetic Sequence
aactgtacga

SEQ ID NO: 3173 - DNA, 10 bp, Artificial Sequence
  Synthetic Sequence
aaccggaaat

SEQ ID NO: 3174 - DNA, 10 bp, Artificial Sequence
  Synthetic Sequence
ctccatcgac

SEQ ID NO: 3175 - DNA, 10 bp, Artificial Sequence
  Synthetic Sequence
agacgcataa

SEQ ID NO: 3176 - DNA, 10 bp, Artificial Sequence
  Synthetic Sequence
cagatatcgc

SEQ ID NO: 3177 - DNA, 10 bp, Artificial Sequence
  Synthetic Sequence
ctctttgttt

SEQ ID NO: 3178 - DNA, 10 bp, Artificial Sequence
  Synthetic Sequence
acgctgacca

SEQ ID NO: 3179 - DNA, 10 bp, Artificial Sequence
  Synthetic Sequence
gtcctttccg

SEQ ID NO: 3180 - DNA, 10 bp, Artificial Sequence
  Synthetic Sequence
tctgacggta

SEQ ID NO: 3181 - DNA, 10 bp, Artificial Sequence
  Synthetic Sequence
catcacgttg

SEQ ID NO: 3182 - DNA, 10 bp, Artificial Sequence
  Synthetic Sequence
tgaagtatac

SEQ ID NO: 3183 - DNA, 10 bp, Artificial Sequence
  Synthetic Sequence
tacgtggcgt

SEQ ID NO: 3184 - DNA, 10 bp, Artificial Sequence
  Synthetic Sequence
ccgctgttgg

SEQ ID NO: 3185 - DNA, 10 bp, Artificial Sequence
  Synthetic Sequence
atctctcaac

SEQ ID NO: 3186 - DNA, 10 bp, Artificial Sequence
  Synthetic Sequence
gtgggatgcg

SEQ ID NO: 3187 - DNA, 10 bp, Artificial Sequence
  Synthetic Sequence
atagcgttac

SEQ ID NO: 3188 - DNA, 10 bp, Artificial Sequence
  Synthetic Sequence
cgcacaacct

SEQ ID NO: 3189 - DNA, 10 bp, Artificial Sequence
  Synthetic Sequence
cgaccagctt

SEQ ID NO: 3190 - DNA, 10 bp, Artificial Sequence
  Synthetic Sequence
aatgttcgat

SEQ ID NO: 3191 - DNA, 10 bp, Artificial Sequence
  Synthetic Sequence
gatccctagc

SEQ ID NO: 3192 - DNA, 10 bp, Artificial Sequence
  Synthetic Sequence
ctgctgttca

SEQ ID NO: 3193 - DNA, 10 bp, Artificial Sequence
  Synthetic Sequence
ccaaactgat

SEQ ID NO: 3194 - DNA, 10 bp, Artificial Sequence
  Synthetic Sequence
tacagcccgc

SEQ ID NO: 3195 - DNA, 10 bp, Artificial Sequence
  Synthetic Sequence
atcaaatacc

SEQ ID NO: 3196 - DNA, 10 bp, Artificial Sequence
  Synthetic Sequence
cgggtaggat

SEQ ID NO: 3197 - DNA, 10 bp, Artificial Sequence
  Synthetic Sequence
gtcgtctacg

SEQ ID NO: 3198 - DNA, 10 bp, Artificial Sequence
  Synthetic Sequence
attgtcacgc

SEQ ID NO: 3199 - DNA, 10 bp, Artificial Sequence
  Synthetic Sequence
gtcgctgctg

SEQ ID NO: 3200 - DNA, 10 bp, Artificial Sequence
  Synthetic Sequence
tggacgcatt

SEQ ID NO: 3201 - DNA, 10 bp, Artificial Sequence
  Synthetic Sequence
tattctttac

SEQ ID NO: 3202 - DNA, 10 bp, Artificial Sequence
  Synthetic Sequence
tccatgtaac

SEQ ID NO: 3203 - DNA, 10 bp, Artificial Sequence
  Synthetic Sequence
cccgaacagt

SEQ ID NO: 3204 - DNA, 10 bp, Artificial Sequence
  Synthetic Sequence
atgatgagat

SEQ ID NO: 3205 - DNA, 10 bp, Artificial Sequence
  Synthetic Sequence
tacgactcga

SEQ ID NO: 3206 - DNA, 10 bp, Artificial Sequence
  Synthetic Sequence
ccattaaacg

SEQ ID NO: 3207 - DNA, 10 bp, Artificial Sequence
  Synthetic Sequence
acttagaatg

SEQ ID NO: 3208 - DNA, 10 bp, Artificial Sequence
  Synthetic Sequence
ggtgtgccat

SEQ ID NO: 3209 - DNA, 10 bp, Artificial Sequence
  Synthetic Sequence
gcacttgcca

SEQ ID NO: 3210 - DNA, 10 bp, Artificial Sequence
  Synthetic Sequence
caagagatcg

SEQ ID NO: 3211 - DNA, 10 bp, Artificial Sequence
  Synthetic Sequence
cctgggcttc

SEQ ID NO: 3212 - DNA, 10 bp, Artificial Sequence
  Synthetic Sequence
tcggagcttg

SEQ ID NO: 3213 - DNA, 10 bp, Artificial Sequence
  Synthetic Sequence
tatcatccaa

SEQ ID NO: 3214 - DNA, 10 bp, Artificial Sequence
  Synthetic Sequence
tcattagatt

SEQ ID NO: 3215 - DNA, 10 bp, Artificial Sequence
  Synthetic Sequence
gactgatcct

SEQ ID NO: 3216 - DNA, 10 bp, Artificial Sequence
  Synthetic Sequence
tggctgtacg

SEQ ID NO: 3217 - DNA, 10 bp, Artificial Sequence
  Synthetic Sequence
gtcaaacagg

SEQ ID NO: 3218 - DNA, 10 bp, Artificial Sequence
  Synthetic Sequence
tagatattgt

SEQ ID NO: 3219 - DNA, 10 bp, Artificial Sequence
  Synthetic Sequence
gagtgcgagg

SEQ ID NO: 3220 - DNA, 10 bp, Artificial Sequence
  Synthetic Sequence
acagcgccac

SEQ ID NO: 3221 - DNA, 10 bp, Artificial Sequence
  Synthetic Sequence
atgtgcttga

SEQ ID NO: 3222 - DNA, 10 bp, Artificial Sequence
  Synthetic Sequence
cctgatcagc

SEQ ID NO: 3223 - DNA, 10 bp, Artificial Sequence
  Synthetic Sequence
gtgaagtctg

SEQ ID NO: 3224 - DNA, 10 bp, Artificial Sequence
  Synthetic Sequence
tcggaggtca

SEQ ID NO: 3225 - DNA, 10 bp, Artificial Sequence
  Synthetic Sequence
gagtcattac

SEQ ID NO: 3226 - DNA, 10 bp, Artificial Sequence
  Synthetic Sequence
aagttgactg

SEQ ID NO: 3227 - DNA, 10 bp, Artificial Sequence
  Synthetic Sequence
cgaacgggtg

SEQ ID NO: 3228 - DNA, 10 bp, Artificial Sequence
  Synthetic Sequence
gcgatccgtc

SEQ ID NO: 3229 - DNA, 10 bp, Artificial Sequence
  Synthetic Sequence
aacggtatca

SEQ ID NO: 3230 - DNA, 10 bp, Artificial Sequence
  Synthetic Sequence
tacgcgtagt

SEQ ID NO: 3231 - DNA, 10 bp, Artificial Sequence
  Synthetic Sequence
acccacgata

SEQ ID NO: 3232 - DNA, 10 bp, Artificial Sequence
  Synthetic Sequence
aaggaagatt

SEQ ID NO: 3233 - DNA, 10 bp, Artificial Sequence
  Synthetic Sequence
aggttgctgt

SEQ ID NO: 3234 - DNA, 10 bp, Artificial Sequence
  Synthetic Sequence
ctgtgcctgt

SEQ ID NO: 3235 - DNA, 10 bp, Artificial Sequence
  Synthetic Sequence
gttgcaggct

SEQ ID NO: 3236 - DNA, 10 bp, Artificial Sequence
  Synthetic Sequence
agtatgcttg

SEQ ID NO: 3237 - DNA, 10 bp, Artificial Sequence
  Synthetic Sequence
gtgtaagccc

SEQ ID NO: 3238 - DNA, 10 bp, Artificial Sequence
  Synthetic Sequence
aaatgtccag

SEQ ID NO: 3239 - DNA, 10 bp, Artificial Sequence
  Synthetic Sequence
cggctaagtt

SEQ ID NO: 3240 - DNA, 10 bp, Artificial Sequence
  Synthetic Sequence
tttatagccc

SEQ ID NO: 3241 - DNA, 10 bp, Artificial Sequence
  Synthetic Sequence
aatgttcata

SEQ ID NO: 3242 - DNA, 10 bp, Artificial Sequence
  Synthetic Sequence
atacgtccct

SEQ ID NO: 3243 - DNA, 10 bp, Artificial Sequence
  Synthetic Sequence
cgggtctaat

SEQ ID NO: 3244 - DNA, 10 bp, Artificial Sequence
  Synthetic Sequence
ggtgggcatg

SEQ ID NO: 3245 - DNA, 10 bp, Artificial Sequence
  Synthetic Sequence
ggatagcgaa

SEQ ID NO: 3246 - DNA, 10 bp, Artificial Sequence
  Synthetic Sequence
aattatgaca

SEQ ID NO: 3247 - DNA, 10 bp, Artificial Sequence
  Synthetic Sequence
attgactatc

SEQ ID NO: 3248 - DNA, 10 bp, Artificial Sequence
  Synthetic Sequence
gcagctacgc

SEQ ID NO: 3249 - DNA, 10 bp, Artificial Sequence
  Synthetic Sequence
cgtggactta

SEQ ID NO: 3250 - DNA, 10 bp, Artificial Sequence
  Synthetic Sequence
taagacggtg

SEQ ID NO: 3251 - DNA, 10 bp, Artificial Sequence
  Synthetic Sequence
ctccaatcta

SEQ ID NO: 3252 - DNA, 10 bp, Artificial Sequence
  Synthetic Sequence
tcgtgacgag

SEQ ID NO: 3253 - DNA, 10 bp, Artificial Sequence
  Synthetic Sequence
gacgtagtaa

SEQ ID NO: 3254 - DNA, 10 bp, Artificial Sequence
  Synthetic Sequence
gtatatcttg

SEQ ID NO: 3255 - DNA, 10 bp, Artificial Sequence
  Synthetic Sequence
aaggccgatg

SEQ ID NO: 3256 - DNA, 10 bp, Artificial Sequence
  Synthetic Sequence
cataccagga

SEQ ID NO: 3257 - DNA, 10 bp, Artificial Sequence
  Synthetic Sequence
cattgtgtaa

SEQ ID NO: 3258 - DNA, 10 bp, Artificial Sequence
  Synthetic Sequence
ctttctcaca

SEQ ID NO: 3259 - DNA, 10 bp, Artificial Sequence
  Synthetic Sequence
aggagctccc

SEQ ID NO: 3260 - DNA, 10 bp, Artificial Sequence
  Synthetic Sequence
gaaatcgtcg

SEQ ID NO: 3261 - DNA, 10 bp, Artificial Sequence
  Synthetic Sequence
ttagtaagaa

SEQ ID NO: 3262 - DNA, 10 bp, Artificial Sequence
  Synthetic Sequence
gtatgggact

SEQ ID NO: 3263 - DNA, 10 bp, Artificial Sequence
  Synthetic Sequence
tcccgtaacg

SEQ ID NO: 3264 - DNA, 10 bp, Artificial Sequence
  Synthetic Sequence
cctagatagc

SEQ ID NO: 3265 - DNA, 10 bp, Artificial Sequence
  Synthetic Sequence
agcgctacta

SEQ ID NO: 3266 - DNA, 10 bp, Artificial Sequence
  Synthetic Sequence
cgcagcatct

SEQ ID NO: 3267 - DNA, 10 bp, Artificial Sequence
  Synthetic Sequence
acaaggtgac

SEQ ID NO: 3268 - DNA, 10 bp, Artificial Sequence
  Synthetic Sequence
gtgtaaaggt

SEQ ID NO: 3269 - DNA, 10 bp, Artificial Sequence
  Synthetic Sequence
gtctttacta

SEQ ID NO: 3270 - DNA, 10 bp, Artificial Sequence
  Synthetic Sequence
aaagtgctta

SEQ ID NO: 3271 - DNA, 10 bp, Artificial Sequence
  Synthetic Sequence
gctttgccaa

SEQ ID NO: 3272 - DNA, 10 bp, Artificial Sequence
  Synthetic Sequence
taccgctgac

SEQ ID NO: 3273 - DNA, 10 bp, Artificial Sequence
  Synthetic Sequence
gttcgagaat

SEQ ID NO: 3274 - DNA, 10 bp, Artificial Sequence
  Synthetic Sequence
aagatgtatc

SEQ ID NO: 3275 - DNA, 10 bp, Artificial Sequence
  Synthetic Sequence
gagtacaagt

SEQ ID NO: 3276 - DNA, 10 bp, Artificial Sequence
  Synthetic Sequence
agaacacaag

SEQ ID NO: 3277 - DNA, 10 bp, Artificial Sequence
  Synthetic Sequence
atgccggcga

SEQ ID NO: 3278 - DNA, 10 bp, Artificial Sequence
  Synthetic Sequence
cgaactgtag

SEQ ID NO: 3279 - DNA, 10 bp, Artificial Sequence
  Synthetic Sequence
ttctagcgca

SEQ ID NO: 3280 - DNA, 10 bp, Artificial Sequence
  Synthetic Sequence
aagcggtcgc

SEQ ID NO: 3281 - DNA, 10 bp, Artificial Sequence
  Synthetic Sequence
agtcgttgct

SEQ ID NO: 3282 - DNA, 10 bp, Artificial Sequence
  Synthetic Sequence
gaatcctcag

SEQ ID NO: 3283 - DNA, 10 bp, Artificial Sequence
  Synthetic Sequence
tgggcctgat

SEQ ID NO: 3284 - DNA, 10 bp, Artificial Sequence
  Synthetic Sequence
tttggcgaca

SEQ ID NO: 3285 - DNA, 10 bp, Artificial Sequence
  Synthetic Sequence
gaatacctag

SEQ ID NO: 3286 - DNA, 10 bp, Artificial Sequence
  Synthetic Sequence
tgtcagcacg

SEQ ID NO: 3287 - DNA, 10 bp, Artificial Sequence
  Synthetic Sequence
ctaggtgccc

SEQ ID NO: 3288 - DNA, 10 bp, Artificial Sequence
  Synthetic Sequence
gaaggaacaa

SEQ ID NO: 3289 - DNA, 10 bp, Artificial Sequence
  Synthetic Sequence
cacggtgaac

SEQ ID NO: 3290 - DNA, 10 bp, Artificial Sequence
  Synthetic Sequence
ctctagtaat

SEQ ID NO: 3291 - DNA, 10 bp, Artificial Sequence
  Synthetic Sequence
agacgtcggc

SEQ ID NO: 3292 - DNA, 10 bp, Artificial Sequence
  Synthetic Sequence
aaattgttag

SEQ ID NO: 3293 - DNA, 10 bp, Artificial Sequence
  Synthetic Sequence
aggtcacggg

SEQ ID NO: 3294 - DNA, 10 bp, Artificial Sequence
  Synthetic Sequence
gtagacagtc

SEQ ID NO: 3295 - DNA, 10 bp, Artificial Sequence
  Synthetic Sequence
ttaggtgaat

SEQ ID NO: 3296 - DNA, 10 bp, Artificial Sequence
  Synthetic Sequence
catcagatac

SEQ ID NO: 3297 - DNA, 10 bp, Artificial Sequence
  Synthetic Sequence
agctatgtga

SEQ ID NO: 3298 - DNA, 10 bp, Artificial Sequence
  Synthetic Sequence
gtcggcctta

SEQ ID NO: 3299 - DNA, 10 bp, Artificial Sequence
  Synthetic Sequence
gattaatatc

SEQ ID NO: 3300 - DNA, 10 bp, Artificial Sequence
  Synthetic Sequence
cgtaacttat

SEQ ID NO: 3301 - DNA, 10 bp, Artificial Sequence
  Synthetic Sequence
gaactaatac

SEQ ID NO: 3302 - DNA, 10 bp, Artificial Sequence
  Synthetic Sequence
gatccaaatc

SEQ ID NO: 3303 - DNA, 10 bp, Artificial Sequence
  Synthetic Sequence
gccagcaaga

SEQ ID NO: 3304 - DNA, 10 bp, Artificial Sequence
  Synthetic Sequence
aatctccggc

SEQ ID NO: 3305 - DNA, 10 bp, Artificial Sequence
  Synthetic Sequence
tcaccagccg

SEQ ID NO: 3306 - DNA, 10 bp, Artificial Sequence
  Synthetic Sequence
tcgccataat

SEQ ID NO: 3307 - DNA, 10 bp, Artificial Sequence
  Synthetic Sequence
ttgactgcga

SEQ ID NO: 3308 - DNA, 10 bp, Artificial Sequence
  Synthetic Sequence
tcgtcggtag

SEQ ID NO: 3309 - DNA, 10 bp, Artificial Sequence
  Synthetic Sequence
tggccctagc

SEQ ID NO: 3310 - DNA, 10 bp, Artificial Sequence
  Synthetic Sequence
tgaaccgctt

SEQ ID NO: 3311 - DNA, 10 bp, Artificial Sequence
  Synthetic Sequence
gtattgttgt

SEQ ID NO: 3312 - DNA, 10 bp, Artificial Sequence
  Synthetic Sequence
aattatacgt

SEQ ID NO: 3313 - DNA, 10 bp, Artificial Sequence
  Synthetic Sequence
gtggcccaca

SEQ ID NO: 3314 - DNA, 10 bp, Artificial Sequence
  Synthetic Sequence
aacatcggta

SEQ ID NO: 3315 - DNA, 10 bp, Artificial Sequence
  Synthetic Sequence
ttatcagatc

SEQ ID NO: 3316 - DNA, 10 bp, Artificial Sequence
  Synthetic Sequence
agcttgagtg

SEQ ID NO: 3317 - DNA, 10 bp, Artificial Sequence
  Synthetic Sequence
ggcatgcgac

SEQ ID NO: 3318 - DNA, 10 bp, Artificial Sequence
  Synthetic Sequence
ggtggtcggt

SEQ ID NO: 3319 - DNA, 10 bp, Artificial Sequence
  Synthetic Sequence
cgaaacccgt

SEQ ID NO: 3320 - DNA, 10 bp, Artificial Sequence
  Synthetic Sequence
caggcgagtg

SEQ ID NO: 3321 - DNA, 10 bp, Artificial Sequence
  Synthetic Sequence
tttagtcgaa

SEQ ID NO: 3322 - DNA, 10 bp, Artificial Sequence
  Synthetic Sequence
tacacgcgtg

SEQ ID NO: 3323 - DNA, 10 bp, Artificial Sequence
  Synthetic Sequence
ttgtctcgta

SEQ ID NO: 3324 - DNA, 10 bp, Artificial Sequence
  Synthetic Sequence
aatacaagac

SEQ ID NO: 3325 - DNA, 10 bp, Artificial Sequence
  Synthetic Sequence
aaacaccatc

SEQ ID NO: 3326 - DNA, 10 bp, Artificial Sequence
  Synthetic Sequence
tgatccctcc

SEQ ID NO: 3327 - DNA, 10 bp, Artificial Sequence
  Synthetic Sequence
agtgtgagcc

SEQ ID NO: 3328 - DNA, 10 bp, Artificial Sequence
  Synthetic Sequence
catcgccgtg

SEQ ID NO: 3329 - DNA, 10 bp, Artificial Sequence
  Synthetic Sequence
ccaccagtgc

SEQ ID NO: 3330 - DNA, 10 bp, Artificial Sequence
  Synthetic Sequence
tatacagtac

SEQ ID NO: 3331 - DNA, 10 bp, Artificial Sequence
  Synthetic Sequence
agagtaacac

SEQ ID NO: 3332 - DNA, 10 bp, Artificial Sequence
  Synthetic Sequence
tagttaacag

SEQ ID NO: 3333 - DNA, 10 bp, Artificial Sequence
  Synthetic Sequence
ctctatttct

SEQ ID NO: 3334 - DNA, 10 bp, Artificial Sequence
  Synthetic Sequence
aatgagacag

SEQ ID NO: 3335 - DNA, 10 bp, Artificial Sequence
  Synthetic Sequence
gctctacttc

SEQ ID NO: 3336 - DNA, 10 bp, Artificial Sequence
  Synthetic Sequence
agacctatga

SEQ ID NO: 3337 - DNA, 10 bp, Artificial Sequence
  Synthetic Sequence
ggcttcctgc

SEQ ID NO: 3338 - DNA, 10 bp, Artificial Sequence
  Synthetic Sequence
gtcgccaatg

SEQ ID NO: 3339 - DNA, 10 bp, Artificial Sequence
  Synthetic Sequence
tttcaatcag

SEQ ID NO: 3340 - DNA, 10 bp, Artificial Sequence
  Synthetic Sequence
cttcaatgct

SEQ ID NO: 3341 - DNA, 10 bp, Artificial Sequence
  Synthetic Sequence
gtcacgtctt

SEQ ID NO: 3342 - DNA, 10 bp, Artificial Sequence
  Synthetic Sequence
tgtctttaac

SEQ ID NO: 3343 - DNA, 10 bp, Artificial Sequence
  Synthetic Sequence
ttaaactgtg

SEQ ID NO: 3344 - DNA, 10 bp, Artificial Sequence
  Synthetic Sequence
gatgaacgct

SEQ ID NO: 3345 - DNA, 10 bp, Artificial Sequence
  Synthetic Sequence
gtttagcaat

SEQ ID NO: 3346 - DNA, 10 bp, Artificial Sequence
  Synthetic Sequence
taactattgg

SEQ ID NO: 3347 - DNA, 10 bp, Artificial Sequence
  Synthetic Sequence
ctcacagggc

SEQ ID NO: 3348 - DNA, 10 bp, Artificial Sequence
  Synthetic Sequence
aagtctgcag

SEQ ID NO: 3349 - DNA, 10 bp, Artificial Sequence
  Synthetic Sequence
cgaatcgatt

SEQ ID NO: 3350 - DNA, 10 bp, Artificial Sequence
  Synthetic Sequence
tgagcatgta

SEQ ID NO: 3351 - DNA, 10 bp, Artificial Sequence
  Synthetic Sequence
gctcgagacg

SEQ ID NO: 3352 - DNA, 10 bp, Artificial Sequence
  Synthetic Sequence
agaaccgccc

SEQ ID NO: 3353 - DNA, 10 bp, Artificial Sequence
  Synthetic Sequence
tcgactcttg

SEQ ID NO: 3354 - DNA, 10 bp, Artificial Sequence
  Synthetic Sequence
gtttgcctga

SEQ ID NO: 3355 - DNA, 10 bp, Artificial Sequence
  Synthetic Sequence
tacagtggga

SEQ ID NO: 3356 - DNA, 10 bp, Artificial Sequence
  Synthetic Sequence
tcagaactcg

SEQ ID NO: 3357 - DNA, 10 bp, Artificial Sequence
  Synthetic Sequence
gacgtttcta

SEQ ID NO: 3358 - DNA, 10 bp, Artificial Sequence
  Synthetic Sequence
acataggaaa

SEQ ID NO: 3359 - DNA, 10 bp, Artificial Sequence
  Synthetic Sequence
ctggtctttg

SEQ ID NO: 3360 - DNA, 10 bp, Artificial Sequence
  Synthetic Sequence
aagggtgaaa

SEQ ID NO: 3361 - DNA, 10 bp, Artificial Sequence
  Synthetic Sequence
tagaatcgtc

SEQ ID NO: 3362 - DNA, 10 bp, Artificial Sequence
  Synthetic Sequence
gtccgaagtc

SEQ ID NO: 3363 - DNA, 10 bp, Artificial Sequence
  Synthetic Sequence
actcgtgtga

SEQ ID NO: 3364 - DNA, 10 bp, Artificial Sequence
  Synthetic Sequence
ggtttaattg

SEQ ID NO: 3365 - DNA, 10 bp, Artificial Sequence
  Synthetic Sequence
cgattgtggt

SEQ ID NO: 3366 - DNA, 10 bp, Artificial Sequence
  Synthetic Sequence
agcacaaatc

SEQ ID NO: 3367 - DNA, 10 bp, Artificial Sequence
  Synthetic Sequence
cgacaaccaa

SEQ ID NO: 3368 - DNA, 10 bp, Artificial Sequence
  Synthetic Sequence
ttatcgcagt

SEQ ID NO: 3369 - DNA, 10 bp, Artificial Sequence
  Synthetic Sequence
gggcatcgta

SEQ ID NO: 3370 - DNA, 10 bp, Artificial Sequence
  Synthetic Sequence
cactgtcgtc

SEQ ID NO: 3371 - DNA, 10 bp, Artificial Sequence
  Synthetic Sequence
ctctaatttc

SEQ ID NO: 3372 - DNA, 10 bp, Artificial Sequence
  Synthetic Sequence
cagttctgtt

SEQ ID NO: 3373 - DNA, 10 bp, Artificial Sequence
  Synthetic Sequence
ctcatgccta

SEQ ID NO: 3374 - DNA, 10 bp, Artificial Sequence
  Synthetic Sequence
gcatcgcatg

SEQ ID NO: 3375 - DNA, 10 bp, Artificial Sequence
  Synthetic Sequence
gaaatggacc

SEQ ID NO: 3376 - DNA, 10 bp, Artificial Sequence
  Synthetic Sequence
caaagacctc

SEQ ID NO: 3377 - DNA, 10 bp, Artificial Sequence
  Synthetic Sequence
attacaacgt

SEQ ID NO: 3378 - DNA, 10 bp, Artificial Sequence
  Synthetic Sequence
acataagcag

SEQ ID NO: 3379 - DNA, 10 bp, Artificial Sequence
  Synthetic Sequence
gcgcagtgaa

SEQ ID NO: 3380 - DNA, 10 bp, Artificial Sequence
  Synthetic Sequence
gaggttgagg

SEQ ID NO: 3381 - DNA, 10 bp, Artificial Sequence
  Synthetic Sequence
cttcgctgtc

SEQ ID NO: 3382 - DNA, 10 bp, Artificial Sequence
  Synthetic Sequence
acaataaacc

SEQ ID NO: 3383 - DNA, 10 bp, Artificial Sequence
  Synthetic Sequence
cacgggtgct

SEQ ID NO: 3384 - DNA, 10 bp, Artificial Sequence
  Synthetic Sequence
cggagttatg

SEQ ID NO: 3385 - DNA, 10 bp, Artificial Sequence
  Synthetic Sequence
agtcgtgtac

SEQ ID NO: 3386 - DNA, 10 bp, Artificial Sequence
  Synthetic Sequence
ttaggtattg

SEQ ID NO: 3387 - DNA, 10 bp, Artificial Sequence
  Synthetic Sequence
agcctgttcg

SEQ ID NO: 3388 - DNA, 10 bp, Artificial Sequence
  Synthetic Sequence
ataactaacc

SEQ ID NO: 3389 - DNA, 10 bp, Artificial Sequence
  Synthetic Sequence
ccacagaggc

SEQ ID NO: 3390 - DNA, 10 bp, Artificial Sequence
  Synthetic Sequence
tgatgtcgga

SEQ ID NO: 3391 - DNA, 10 bp, Artificial Sequence
  Synthetic Sequence
ccgcaaggta

SEQ ID NO: 3392 - DNA, 10 bp, Artificial Sequence
  Synthetic Sequence
cgagcgttta

SEQ ID NO: 3393 - DNA, 10 bp, Artificial Sequence
  Synthetic Sequence
catgtgacgt

SEQ ID NO: 3394 - DNA, 10 bp, Artificial Sequence
  Synthetic Sequence
gcaatgtaaa

SEQ ID NO: 3395 - DNA, 10 bp, Artificial Sequence
  Synthetic Sequence
gatgtactca

SEQ ID NO: 3396 - DNA, 10 bp, Artificial Sequence
  Synthetic Sequence
atacggccac

SEQ ID NO: 3397 - DNA, 10 bp, Artificial Sequence
  Synthetic Sequence
ctccgggaat

SEQ ID NO: 3398 - DNA, 10 bp, Artificial Sequence
  Synthetic Sequence
gcgcggaatt

SEQ ID NO: 3399 - DNA, 10 bp, Artificial Sequence
  Synthetic Sequence
gatggttctc

SEQ ID NO: 3400 - DNA, 10 bp, Artificial Sequence
  Synthetic Sequence
accacatggc

SEQ ID NO: 3401 - DNA, 10 bp, Artificial Sequence
  Synthetic Sequence
atgcaacgga

SEQ ID NO: 3402 - DNA, 10 bp, Artificial Sequence
  Synthetic Sequence
ccaacgtctg

SEQ ID NO: 3403 - DNA, 10 bp, Artificial Sequence
  Synthetic Sequence
tatcccagca

SEQ ID NO: 3404 - DNA, 10 bp, Artificial Sequence
  Synthetic Sequence
cagctgtaga

SEQ ID NO: 3405 - DNA, 10 bp, Artificial Sequence
  Synthetic Sequence
accggtttgt

SEQ ID NO: 3406 - DNA, 10 bp, Artificial Sequence
  Synthetic Sequence
ttcaaccgcc

SEQ ID NO: 3407 - DNA, 10 bp, Artificial Sequence
  Synthetic Sequence
ctgttgacgt

SEQ ID NO: 3408 - DNA, 10 bp, Artificial Sequence
  Synthetic Sequence
agaccacccg

SEQ ID NO: 3409 - DNA, 10 bp, Artificial Sequence
  Synthetic Sequence
aatgttgcaa

SEQ ID NO: 3410 - DNA, 10 bp, Artificial Sequence
  Synthetic Sequence
cgtaggacat

SEQ ID NO: 3411 - DNA, 10 bp, Artificial Sequence
  Synthetic Sequence
gtgactgatg

SEQ ID NO: 3412 - DNA, 10 bp, Artificial Sequence
  Synthetic Sequence
ccgtcaccca

SEQ ID NO: 3413 - DNA, 10 bp, Artificial Sequence
  Synthetic Sequence
gcttgtcatt

SEQ ID NO: 3414 - DNA, 10 bp, Artificial Sequence
  Synthetic Sequence
ggccagaagt

SEQ ID NO: 3415 - DNA, 10 bp, Artificial Sequence
  Synthetic Sequence
cgcagggata

SEQ ID NO: 3416 - DNA, 10 bp, Artificial Sequence
  Synthetic Sequence
cttcggccgt

SEQ ID NO: 3417 - DNA, 10 bp, Artificial Sequence
  Synthetic Sequence
attcagcgag

SEQ ID NO: 3418 - DNA, 10 bp, Artificial Sequence
  Synthetic Sequence
acgattgaca

SEQ ID NO: 3419 - DNA, 10 bp, Artificial Sequence
  Synthetic Sequence
tagctaattg

SEQ ID NO: 3420 - DNA, 10 bp, Artificial Sequence
  Synthetic Sequence
tagggtatgg

SEQ ID NO: 3421 - DNA, 10 bp, Artificial Sequence
  Synthetic Sequence
atggcgagag

SEQ ID NO: 3422 - DNA, 10 bp, Artificial Sequence
  Synthetic Sequence
atttgcgcgt

SEQ ID NO: 3423 - DNA, 10 bp, Artificial Sequence
  Synthetic Sequence
tgtcgtggga

SEQ ID NO: 3424 - DNA, 10 bp, Artificial Sequence
  Synthetic Sequence
ctcgccgaac

SEQ ID NO: 3425 - DNA, 10 bp, Artificial Sequence
  Synthetic Sequence
gcttgaaacc

SEQ ID NO: 3426 - DNA, 10 bp, Artificial Sequence
  Synthetic Sequence
gcgacggtaa

SEQ ID NO: 3427 - DNA, 10 bp, Artificial Sequence
  Synthetic Sequence
gtaactttgc

SEQ ID NO: 3428 - DNA, 10 bp, Artificial Sequence
  Synthetic Sequence
taaactcaga

SEQ ID NO: 3429 - DNA, 10 bp, Artificial Sequence
  Synthetic Sequence
cgtagaccgc

SEQ ID NO: 3430 - DNA, 10 bp, Artificial Sequence
  Synthetic Sequence
gtttactcca

SEQ ID NO: 3431 - DNA, 10 bp, Artificial Sequence
  Synthetic Sequence
ccctggcgat

SEQ ID NO: 3432 - DNA, 10 bp, Artificial Sequence
  Synthetic Sequence
ctagggtcga

SEQ ID NO: 3433 - DNA, 10 bp, Artificial Sequence
  Synthetic Sequence
caatgttaat

SEQ ID NO: 3434 - DNA, 10 bp, Artificial Sequence
  Synthetic Sequence
gaggctctgg

SEQ ID NO: 3435 - DNA, 10 bp, Artificial Sequence
  Synthetic Sequence
gtgactggca

SEQ ID NO: 3436 - DNA, 10 bp, Artificial Sequence
  Synthetic Sequence
atctaaaggc

SEQ ID NO: 3437 - DNA, 10 bp, Artificial Sequence
  Synthetic Sequence
ttcgatgtac

SEQ ID NO: 3438 - DNA, 10 bp, Artificial Sequence
  Synthetic Sequence
agagggtgtg

SEQ ID NO: 3439 - DNA, 10 bp, Artificial Sequence
  Synthetic Sequence
ctggatgcgg

SEQ ID NO: 3440 - DNA, 10 bp, Artificial Sequence
  Synthetic Sequence
aggctccacc

SEQ ID NO: 3441 - DNA, 10 bp, Artificial Sequence
  Synthetic Sequence
tcctattggt

SEQ ID NO: 3442 - DNA, 10 bp, Artificial Sequence
  Synthetic Sequence
gacctggcat

SEQ ID NO: 3443 - DNA, 10 bp, Artificial Sequence
  Synthetic Sequence
tgcagcaata

SEQ ID NO: 3444 - DNA, 10 bp, Artificial Sequence
  Synthetic Sequence
aaacgtgtgc

SEQ ID NO: 3445 - DNA, 10 bp, Artificial Sequence
  Synthetic Sequence
ggacgctcag

SEQ ID NO: 3446 - DNA, 10 bp, Artificial Sequence
  Synthetic Sequence
cctgtttggg

SEQ ID NO: 3447 - DNA, 10 bp, Artificial Sequence
  Synthetic Sequence
tctgccatat

SEQ ID NO: 3448 - DNA, 10 bp, Artificial Sequence
  Synthetic Sequence
tcagagtata

SEQ ID NO: 3449 - DNA, 10 bp, Artificial Sequence
  Synthetic Sequence
gtaggtcgtc

SEQ ID NO: 3450 - DNA, 10 bp, Artificial Sequence
  Synthetic Sequence
aatggcttcg

SEQ ID NO: 3451 - DNA, 10 bp, Artificial Sequence
  Synthetic Sequence
cgcacacgtt

SEQ ID NO: 3452 - DNA, 10 bp, Artificial Sequence
  Synthetic Sequence
gctggcagca

SEQ ID NO: 3453 - DNA, 10 bp, Artificial Sequence
  Synthetic Sequence
cagcacagcg

SEQ ID NO: 3454 - DNA, 10 bp, Artificial Sequence
  Synthetic Sequence
aggcgagacg

SEQ ID NO: 3455 - DNA, 10 bp, Artificial Sequence
  Synthetic Sequence
ttgaaggcac

SEQ ID NO: 3456 - DNA, 10 bp, Artificial Sequence
  Synthetic Sequence
cgcaaagccg

SEQ ID NO: 3457 - DNA, 10 bp, Artificial Sequence
  Synthetic Sequence
ctcactcgga

SEQ ID NO: 3458 - DNA, 10 bp, Artificial Sequence
  Synthetic Sequence
gcttgcttcg

SEQ ID NO: 3459 - DNA, 10 bp, Artificial Sequence
  Synthetic Sequence
aaggagcaag

SEQ ID NO: 3460 - DNA, 10 bp, Artificial Sequence
  Synthetic Sequence
actttaaatt

SEQ ID NO: 3461 - DNA, 10 bp, Artificial Sequence
  Synthetic Sequence
taatgcaaat

SEQ ID NO: 3462 - DNA, 10 bp, Artificial Sequence
  Synthetic Sequence
ttctacttta

SEQ ID NO: 3463 - DNA, 10 bp, Artificial Sequence
  Synthetic Sequence
ccctatgcat

SEQ ID NO: 3464 - DNA, 10 bp, Artificial Sequence
  Synthetic Sequence
cacttatccg

SEQ ID NO: 3465 - DNA, 10 bp, Artificial Sequence
  Synthetic Sequence
gctcgggcta

SEQ ID NO: 3466 - DNA, 10 bp, Artificial Sequence
  Synthetic Sequence
ggtcatcact

SEQ ID NO: 3467 - DNA, 10 bp, Artificial Sequence
  Synthetic Sequence
ggaggtaaga

SEQ ID NO: 3468 - DNA, 10 bp, Artificial Sequence
  Synthetic Sequence
tcccacacac

SEQ ID NO: 3469 - DNA, 10 bp, Artificial Sequence
  Synthetic Sequence
acattggttg

SEQ ID NO: 3470 - DNA, 10 bp, Artificial Sequence
  Synthetic Sequence
acgcgctcaa

SEQ ID NO: 3471 - DNA, 10 bp, Artificial Sequence
  Synthetic Sequence
ctatgggatc

SEQ ID NO: 3472 - DNA, 10 bp, Artificial Sequence
  Synthetic Sequence
atcggtcgga

SEQ ID NO: 3473 - DNA, 10 bp, Artificial Sequence
  Synthetic Sequence
aaccggtgcc

SEQ ID NO: 3474 - DNA, 10 bp, Artificial Sequence
  Synthetic Sequence
acacacggaa

SEQ ID NO: 3475 - DNA, 10 bp, Artificial Sequence
  Synthetic Sequence
attcctcgtg

SEQ ID NO: 3476 - DNA, 10 bp, Artificial Sequence
  Synthetic Sequence
acacgacctc

SEQ ID NO: 3477 - DNA, 10 bp, Artificial Sequence
  Synthetic Sequence
tcacgcacta

SEQ ID NO: 3478 - DNA, 10 bp, Artificial Sequence
  Synthetic Sequence
aggatggagg

SEQ ID NO: 3479 - DNA, 10 bp, Artificial Sequence
  Synthetic Sequence
cctctcatta

SEQ ID NO: 3480 - DNA, 10 bp, Artificial Sequence
  Synthetic Sequence
cctacctgct

SEQ ID NO: 3481 - DNA, 10 bp, Artificial Sequence
  Synthetic Sequence
aataatctgt

SEQ ID NO: 3482 - DNA, 10 bp, Artificial Sequence
  Synthetic Sequence
aatctgtcat

SEQ ID NO: 3483 - DNA, 10 bp, Artificial Sequence
  Synthetic Sequence
cgaataactc

SEQ ID NO: 3484 - DNA, 10 bp, Artificial Sequence
  Synthetic Sequence
aatatataac

SEQ ID NO: 3485 - DNA, 10 bp, Artificial Sequence
  Synthetic Sequence
cgtatgcagc

SEQ ID NO: 3486 - DNA, 10 bp, Artificial Sequence
  Synthetic Sequence
tgagagaagt

SEQ ID NO: 3487 - DNA, 10 bp, Artificial Sequence
  Synthetic Sequence
tacctagact

SEQ ID NO: 3488 - DNA, 10 bp, Artificial Sequence
  Synthetic Sequence
ctcgggcact

SEQ ID NO: 3489 - DNA, 10 bp, Artificial Sequence
  Synthetic Sequence
gttaaacgta

SEQ ID NO: 3490 - DNA, 10 bp, Artificial Sequence
  Synthetic Sequence
cgcgttggca

SEQ ID NO: 3491 - DNA, 10 bp, Artificial Sequence
  Synthetic Sequence
tagcccgtag

SEQ ID NO: 3492 - DNA, 10 bp, Artificial Sequence
  Synthetic Sequence
caatgggtct

SEQ ID NO: 3493 - DNA, 10 bp, Artificial Sequence
  Synthetic Sequence
cctgggtacg

SEQ ID NO: 3494 - DNA, 10 bp, Artificial Sequence
  Synthetic Sequence
atcgaagtct

SEQ ID NO: 3495 - DNA, 10 bp, Artificial Sequence
  Synthetic Sequence
aagttctggg

SEQ ID NO: 3496 - DNA, 10 bp, Artificial Sequence
  Synthetic Sequence
gtcgagaaag

SEQ ID NO: 3497 - DNA, 10 bp, Artificial Sequence
  Synthetic Sequence
gagcttgcct

SEQ ID NO: 3498 - DNA, 10 bp, Artificial Sequence
  Synthetic Sequence
tattgcaggg

SEQ ID NO: 3499 - DNA, 10 bp, Artificial Sequence
  Synthetic Sequence
gccagttgcc

SEQ ID NO: 3500 - DNA, 10 bp, Artificial Sequence
  Synthetic Sequence
accgatgagt

SEQ ID NO: 3501 - DNA, 10 bp, Artificial Sequence
  Synthetic Sequence
actattagcc

SEQ ID NO: 3502 - DNA, 10 bp, Artificial Sequence
  Synthetic Sequence
ctcacagtca

SEQ ID NO: 3503 - DNA, 10 bp, Artificial Sequence
  Synthetic Sequence
tggaagatca

SEQ ID NO: 3504 - DNA, 10 bp, Artificial Sequence
  Synthetic Sequence
gggttagctg

SEQ ID NO: 3505 - DNA, 10 bp, Artificial Sequence
  Synthetic Sequence
aaaccagtca

SEQ ID NO: 3506 - DNA, 10 bp, Artificial Sequence
  Synthetic Sequence
ctctccatta

SEQ ID NO: 3507 - DNA, 10 bp, Artificial Sequence
  Synthetic Sequence
ataaagtacg

SEQ ID NO: 3508 - DNA, 10 bp, Artificial Sequence
  Synthetic Sequence
ggtcccttaa

SEQ ID NO: 3509 - DNA, 10 bp, Artificial Sequence
  Synthetic Sequence
aacctacgct

SEQ ID NO: 3510 - DNA, 10 bp, Artificial Sequence
  Synthetic Sequence
tatagtaggc

SEQ ID NO: 3511 - DNA, 10 bp, Artificial Sequence
  Synthetic Sequence
ctaaggctct

SEQ ID NO: 3512 - DNA, 10 bp, Artificial Sequence
  Synthetic Sequence
cgaaacatta

SEQ ID NO: 3513 - DNA, 10 bp, Artificial Sequence
  Synthetic Sequence
tatccctcta

SEQ ID NO: 3514 - DNA, 10 bp, Artificial Sequence
  Synthetic Sequence
ccgtcacaat

SEQ ID NO: 3515 - DNA, 10 bp, Artificial Sequence
  Synthetic Sequence
atcgtgtctc

SEQ ID NO: 3516 - DNA, 10 bp, Artificial Sequence
  Synthetic Sequence
aataaggctt

SEQ ID NO: 3517 - DNA, 10 bp, Artificial Sequence
  Synthetic Sequence
gctaggatca

SEQ ID NO: 3518 - DNA, 10 bp, Artificial Sequence
  Synthetic Sequence
aagacgcggc

SEQ ID NO: 3519 - DNA, 10 bp, Artificial Sequence
  Synthetic Sequence
tagccgcacg

SEQ ID NO: 3520 - DNA, 10 bp, Artificial Sequence
  Synthetic Sequence
gaatgttcta

SEQ ID NO: 3521 - DNA, 10 bp, Artificial Sequence
  Synthetic Sequence
gtcgatatct

SEQ ID NO: 3522 - DNA, 10 bp, Artificial Sequence
  Synthetic Sequence
ggagaaatca

SEQ ID NO: 3523 - DNA, 10 bp, Artificial Sequence
  Synthetic Sequence
ctaaccgttt

SEQ ID NO: 3524 - DNA, 10 bp, Artificial Sequence
  Synthetic Sequence
gggcagacaa

SEQ ID NO: 3525 - DNA, 10 bp, Artificial Sequence
  Synthetic Sequence
gctatagccg

SEQ ID NO: 3526 - DNA, 10 bp, Artificial Sequence
  Synthetic Sequence
gcaaggtatt

SEQ ID NO: 3527 - DNA, 10 bp, Artificial Sequence
  Synthetic Sequence
cggacccttt

SEQ ID NO: 3528 - DNA, 10 bp, Artificial Sequence
  Synthetic Sequence
tctggatcta

SEQ ID NO: 3529 - DNA, 10 bp, Artificial Sequence
  Synthetic Sequence
cccgtgtagt

SEQ ID NO: 3530 - DNA, 10 bp, Artificial Sequence
  Synthetic Sequence
tgggctgagc

SEQ ID NO: 3531 - DNA, 10 bp, Artificial Sequence
  Synthetic Sequence
ggtaatacta

SEQ ID NO: 3532 - DNA, 10 bp, Artificial Sequence
  Synthetic Sequence
gcatctgcag

SEQ ID NO: 3533 - DNA, 10 bp, Artificial Sequence
  Synthetic Sequence
gcgtgaccga

SEQ ID NO: 3534 - DNA, 10 bp, Artificial Sequence
  Synthetic Sequence
gcagcgatgg

SEQ ID NO: 3535 - DNA, 10 bp, Artificial Sequence
  Synthetic Sequence
cccgactctg

SEQ ID NO: 3536 - DNA, 10 bp, Artificial Sequence
  Synthetic Sequence
cggtacatac

SEQ ID NO: 3537 - DNA, 10 bp, Artificial Sequence
  Synthetic Sequence
cccatgtgtt

SEQ ID NO: 3538 - DNA, 10 bp, Artificial Sequence
  Synthetic Sequence
acacccttgg

SEQ ID NO: 3539 - DNA, 10 bp, Artificial Sequence
  Synthetic Sequence
tttcaggcta

SEQ ID NO: 3540 - DNA, 10 bp, Artificial Sequence
  Synthetic Sequence
cagggactga

SEQ ID NO: 3541 - DNA, 10 bp, Artificial Sequence
  Synthetic Sequence
ggaactacct

SEQ ID NO: 3542 - DNA, 10 bp, Artificial Sequence
  Synthetic Sequence
cgctctacgg

SEQ ID NO: 3543 - DNA, 10 bp, Artificial Sequence
  Synthetic Sequence
aggagtcata

SEQ ID NO: 3544 - DNA, 10 bp, Artificial Sequence
  Synthetic Sequence
cggtaggaca

SEQ ID NO: 3545 - DNA, 10 bp, Artificial Sequence
  Synthetic Sequence
tttgtgcact

SEQ ID NO: 3546 - DNA, 10 bp, Artificial Sequence
  Synthetic Sequence
atccggtcaa

SEQ ID NO: 3547 - DNA, 10 bp, Artificial Sequence
  Synthetic Sequence
ttctattctg

SEQ ID NO: 3548 - DNA, 10 bp, Artificial Sequence
  Synthetic Sequence
atgttcagcc

SEQ ID NO: 3549 - DNA, 10 bp, Artificial Sequence
  Synthetic Sequence
ggcaacacaa

SEQ ID NO: 3550 - DNA, 10 bp, Artificial Sequence
  Synthetic Sequence
gtgagacaac

SEQ ID NO: 3551 - DNA, 10 bp, Artificial Sequence
  Synthetic Sequence
ggactgagtc

SEQ ID NO: 3552 - DNA, 10 bp, Artificial Sequence
  Synthetic Sequence
aatcccgatt

SEQ ID NO: 3553 - DNA, 10 bp, Artificial Sequence
  Synthetic Sequence
accagacttt

SEQ ID NO: 3554 - DNA, 10 bp, Artificial Sequence
  Synthetic Sequence
gcgcacctga

SEQ ID NO: 3555 - DNA, 10 bp, Artificial Sequence
  Synthetic Sequence
ctctcggagg

SEQ ID NO: 3556 - DNA, 10 bp, Artificial Sequence
  Synthetic Sequence
aagagacgaa

SEQ ID NO: 3557 - DNA, 10 bp, Artificial Sequence
  Synthetic Sequence
attataggtg

SEQ ID NO: 3558 - DNA, 10 bp, Artificial Sequence
  Synthetic Sequence
gtgcgtccca

SEQ ID NO: 3559 - DNA, 10 bp, Artificial Sequence
  Synthetic Sequence
ccgggaagga

SEQ ID NO: 3560 - DNA, 10 bp, Artificial Sequence
  Synthetic Sequence
actatggaac

SEQ ID NO: 3561 - DNA, 10 bp, Artificial Sequence
  Synthetic Sequence
cctgatccat

SEQ ID NO: 3562 - DNA, 10 bp, Artificial Sequence
  Synthetic Sequence
aactcaacaa

SEQ ID NO: 3563 - DNA, 10 bp, Artificial Sequence
  Synthetic Sequence
gatagagtcg

SEQ ID NO: 3564 - DNA, 10 bp, Artificial Sequence
  Synthetic Sequence
tatcagtccg

SEQ ID NO: 3565 - DNA, 10 bp, Artificial Sequence
  Synthetic Sequence
atacctacgc

SEQ ID NO: 3566 - DNA, 10 bp, Artificial Sequence
  Synthetic Sequence
cgggaaagtg

SEQ ID NO: 3567 - DNA, 10 bp, Artificial Sequence
  Synthetic Sequence
cacaacagat

SEQ ID NO: 3568 - DNA, 10 bp, Artificial Sequence
  Synthetic Sequence
cccaagcgag

SEQ ID NO: 3569 - DNA, 10 bp, Artificial Sequence
  Synthetic Sequence
attatacggc

SEQ ID NO: 3570 - DNA, 10 bp, Artificial Sequence
  Synthetic Sequence
cacacctaga

SEQ ID NO: 3571 - DNA, 10 bp, Artificial Sequence
  Synthetic Sequence
agcctacttg

SEQ ID NO: 3572 - DNA, 10 bp, Artificial Sequence
  Synthetic Sequence
cgacttctgg

SEQ ID NO: 3573 - DNA, 10 bp, Artificial Sequence
  Synthetic Sequence
taatagctga

SEQ ID NO: 3574 - DNA, 10 bp, Artificial Sequence
  Synthetic Sequence
ggagcacggt

SEQ ID NO: 3575 - DNA, 10 bp, Artificial Sequence
  Synthetic Sequence
cgtcagttct

SEQ ID NO: 3576 - DNA, 10 bp, Artificial Sequence
  Synthetic Sequence
tctttaattc

SEQ ID NO: 3577 - DNA, 10 bp, Artificial Sequence
  Synthetic Sequence
gcccgaaagt

SEQ ID NO: 3578 - DNA, 10 bp, Artificial Sequence
  Synthetic Sequence
cggtgaaggc

SEQ ID NO: 3579 - DNA, 10 bp, Artificial Sequence
  Synthetic Sequence
actgggaaac

SEQ ID NO: 3580 - DNA, 10 bp, Artificial Sequence
  Synthetic Sequence
atgatgtcaa

SEQ ID NO: 3581 - DNA, 10 bp, Artificial Sequence
  Synthetic Sequence
attccggttg

SEQ ID NO: 3582 - DNA, 10 bp, Artificial Sequence
  Synthetic Sequence
acgagcgtac

SEQ ID NO: 3583 - DNA, 10 bp, Artificial Sequence
  Synthetic Sequence
gcagcagcgt

SEQ ID NO: 3584 - DNA, 10 bp, Artificial Sequence
  Synthetic Sequence
agatgagtcc

SEQ ID NO: 3585 - DNA, 10 bp, Artificial Sequence
  Synthetic Sequence
cttgtcagga

SEQ ID NO: 3586 - DNA, 10 bp, Artificial Sequence
  Synthetic Sequence
agtggttagt

SEQ ID NO: 3587 - DNA, 10 bp, Artificial Sequence
  Synthetic Sequence
taaattcttc

SEQ ID NO: 3588 - DNA, 10 bp, Artificial Sequence
  Synthetic Sequence
aacctcagac

SEQ ID NO: 3589 - DNA, 10 bp, Artificial Sequence
  Synthetic Sequence
cgtcacgcac

SEQ ID NO: 3590 - DNA, 10 bp, Artificial Sequence
  Synthetic Sequence
cgttaatcga

SEQ ID NO: 3591 - DNA, 10 bp, Artificial Sequence
  Synthetic Sequence
ggtgtatatc

SEQ ID NO: 3592 - DNA, 10 bp, Artificial Sequence
  Synthetic Sequence
gcgaaagtct

SEQ ID NO: 3593 - DNA, 10 bp, Artificial Sequence
  Synthetic Sequence
ttcaggttag

SEQ ID NO: 3594 - DNA, 10 bp, Artificial Sequence
  Synthetic Sequence
agacaatttc

SEQ ID NO: 3595 - DNA, 10 bp, Artificial Sequence
  Synthetic Sequence
accaaagcgg

SEQ ID NO: 3596 - DNA, 10 bp, Artificial Sequence
  Synthetic Sequence
tttcacagcg

SEQ ID NO: 3597 - DNA, 10 bp, Artificial Sequence
  Synthetic Sequence
gtaccaccta

SEQ ID NO: 3598 - DNA, 10 bp, Artificial Sequence
  Synthetic Sequence
ccgcacacat

SEQ ID NO: 3599 - DNA, 10 bp, Artificial Sequence
  Synthetic Sequence
agaaacggta

SEQ ID NO: 3600 - DNA, 10 bp, Artificial Sequence
  Synthetic Sequence
gtgttgaaat

SEQ ID NO: 3601 - DNA, 10 bp, Artificial Sequence
  Synthetic Sequence
attaccggtt

SEQ ID NO: 3602 - DNA, 10 bp, Artificial Sequence
  Synthetic Sequence
gcatttaatt

SEQ ID NO: 3603 - DNA, 10 bp, Artificial Sequence
  Synthetic Sequence
tcacgtcggt

SEQ ID NO: 3604 - DNA, 10 bp, Artificial Sequence
  Synthetic Sequence
ccatacttct

SEQ ID NO: 3605 - DNA, 10 bp, Artificial Sequence
  Synthetic Sequence
atatgccgtt

SEQ ID NO: 3606 - DNA, 10 bp, Artificial Sequence
  Synthetic Sequence
gattaaccaa

SEQ ID NO: 3607 - DNA, 10 bp, Artificial Sequence
  Synthetic Sequence
ggctgttcgg

SEQ ID NO: 3608 - DNA, 10 bp, Artificial Sequence
  Synthetic Sequence
tccgtgttgg

SEQ ID NO: 3609 - DNA, 10 bp, Artificial Sequence
  Synthetic Sequence
ctaatttcta

SEQ ID NO: 3610 - DNA, 10 bp, Artificial Sequence
  Synthetic Sequence
agcgcccaac

SEQ ID NO: 3611 - DNA, 10 bp, Artificial Sequence
  Synthetic Sequence
gcaacttgag

SEQ ID NO: 3612 - DNA, 10 bp, Artificial Sequence
  Synthetic Sequence
cgagcggcat

SEQ ID NO: 3613 - DNA, 10 bp, Artificial Sequence
  Synthetic Sequence
cccgctcatc

SEQ ID NO: 3614 - DNA, 10 bp, Artificial Sequence
  Synthetic Sequence
tgattggcat

SEQ ID NO: 3615 - DNA, 10 bp, Artificial Sequence
  Synthetic Sequence
tggacatttg

SEQ ID NO: 3616 - DNA, 10 bp, Artificial Sequence
  Synthetic Sequence
caagtatgat

SEQ ID NO: 3617 - DNA, 10 bp, Artificial Sequence
  Synthetic Sequence
cccagtcaca

SEQ ID NO: 3618 - DNA, 10 bp, Artificial Sequence
  Synthetic Sequence
gacactatcc

SEQ ID NO: 3619 - DNA, 10 bp, Artificial Sequence
  Synthetic Sequence
ctatgagccg

SEQ ID NO: 3620 - DNA, 10 bp, Artificial Sequence
  Synthetic Sequence
ttcgttcata

SEQ ID NO: 3621 - DNA, 10 bp, Artificial Sequence
  Synthetic Sequence
tcgttgaata

SEQ ID NO: 3622 - DNA, 10 bp, Artificial Sequence
  Synthetic Sequence
gccatacagc

SEQ ID NO: 3623 - DNA, 10 bp, Artificial Sequence
  Synthetic Sequence
atgcctgtct

SEQ ID NO: 3624 - DNA, 10 bp, Artificial Sequence
  Synthetic Sequence
cgtaccttgg

SEQ ID NO: 3625 - DNA, 10 bp, Artificial Sequence
  Synthetic Sequence
cgcttcaata

SEQ ID NO: 3626 - DNA, 10 bp, Artificial Sequence
  Synthetic Sequence
aaagtgggca

SEQ ID NO: 3627 - DNA, 10 bp, Artificial Sequence
  Synthetic Sequence
taccaggcgg

SEQ ID NO: 3628 - DNA, 10 bp, Artificial Sequence
  Synthetic Sequence
caatacgaaa

SEQ ID NO: 3629 - DNA, 10 bp, Artificial Sequence
  Synthetic Sequence
gaactcctat

SEQ ID NO: 3630 - DNA, 10 bp, Artificial Sequence
  Synthetic Sequence
ccctaaattg

SEQ ID NO: 3631 - DNA, 10 bp, Artificial Sequence
  Synthetic Sequence
cttagactga

SEQ ID NO: 3632 - DNA, 10 bp, Artificial Sequence
  Synthetic Sequence
cacggaaata

SEQ ID NO: 3633 - DNA, 10 bp, Artificial Sequence
  Synthetic Sequence
gccgttctct

SEQ ID NO: 3634 - DNA, 10 bp, Artificial Sequence
  Synthetic Sequence
acgtgccttc

SEQ ID NO: 3635 - DNA, 10 bp, Artificial Sequence
  Synthetic Sequence
ctatggtagt

SEQ ID NO: 3636 - DNA, 10 bp, Artificial Sequence
  Synthetic Sequence
gagaagctct

SEQ ID NO: 3637 - DNA, 10 bp, Artificial Sequence
  Synthetic Sequence
aaagccagac

SEQ ID NO: 3638 - DNA, 10 bp, Artificial Sequence
  Synthetic Sequence
ctgtacaaat

SEQ ID NO: 3639 - DNA, 10 bp, Artificial Sequence
  Synthetic Sequence
tcggattccg

SEQ ID NO: 3640 - DNA, 10 bp, Artificial Sequence
  Synthetic Sequence
agggcatcgc

SEQ ID NO: 3641 - DNA, 10 bp, Artificial Sequence
  Synthetic Sequence
ctacttagcg

SEQ ID NO: 3642 - DNA, 10 bp, Artificial Sequence
  Synthetic Sequence
gctaaaggat

SEQ ID NO: 3643 - DNA, 10 bp, Artificial Sequence
  Synthetic Sequence
gcgttcatac

SEQ ID NO: 3644 - DNA, 10 bp, Artificial Sequence
  Synthetic Sequence
ttactaaaga

SEQ ID NO: 3645 - DNA, 10 bp, Artificial Sequence
  Synthetic Sequence
agggcaatta

SEQ ID NO: 3646 - DNA, 10 bp, Artificial Sequence
  Synthetic Sequence
gtgctcagtc

SEQ ID NO: 3647 - DNA, 10 bp, Artificial Sequence
  Synthetic Sequence
accatttaaa

SEQ ID NO: 3648 - DNA, 10 bp, Artificial Sequence
  Synthetic Sequence
atatttgtag

SEQ ID NO: 3649 - DNA, 10 bp, Artificial Sequence
  Synthetic Sequence
ccaagtggtt

SEQ ID NO: 3650 - DNA, 10 bp, Artificial Sequence
  Synthetic Sequence
ttgaaggaca

SEQ ID NO: 3651 - DNA, 10 bp, Artificial Sequence
  Synthetic Sequence
tgagcagcgg

SEQ ID NO: 3652 - DNA, 10 bp, Artificial Sequence
  Synthetic Sequence
gtagaggcat

SEQ ID NO: 3653 - DNA, 10 bp, Artificial Sequence
  Synthetic Sequence
gaataaagcc

SEQ ID NO: 3654 - DNA, 10 bp, Artificial Sequence
  Synthetic Sequence
ggttgtagcg

SEQ ID NO: 3655 - DNA, 10 bp, Artificial Sequence
  Synthetic Sequence
tactgaaatt

SEQ ID NO: 3656 - DNA, 10 bp, Artificial Sequence
  Synthetic Sequence
aacattcccg

SEQ ID NO: 3657 - DNA, 10 bp, Artificial Sequence
  Synthetic Sequence
gagggctgga

SEQ ID NO: 3658 - DNA, 10 bp, Artificial Sequence
  Synthetic Sequence
tcaccggatt

SEQ ID NO: 3659 - DNA, 10 bp, Artificial Sequence
  Synthetic Sequence
ttactgagtt

SEQ ID NO: 3660 - DNA, 10 bp, Artificial Sequence
  Synthetic Sequence
cacaagcgta

SEQ ID NO: 3661 - DNA, 10 bp, Artificial Sequence
  Synthetic Sequence
taatagtacc

SEQ ID NO: 3662 - DNA, 10 bp, Artificial Sequence
  Synthetic Sequence
gcctgtggca

SEQ ID NO: 3663 - DNA, 10 bp, Artificial Sequence
  Synthetic Sequence
cacagtgcta

SEQ ID NO: 3664 - DNA, 10 bp, Artificial Sequence
  Synthetic Sequence
aagggcaatc

SEQ ID NO: 3665 - DNA, 10 bp, Artificial Sequence
  Synthetic Sequence
aagtgaagct

SEQ ID NO: 3666 - DNA, 10 bp, Artificial Sequence
  Synthetic Sequence
aaggactgat

SEQ ID NO: 3667 - DNA, 10 bp, Artificial Sequence
  Synthetic Sequence
ctgagagact

SEQ ID NO: 3668 - DNA, 10 bp, Artificial Sequence
  Synthetic Sequence
tccaccgtct

SEQ ID NO: 3669 - DNA, 10 bp, Artificial Sequence
  Synthetic Sequence
agcacagttg

SEQ ID NO: 3670 - DNA, 10 bp, Artificial Sequence
  Synthetic Sequence
cttgctatcg

SEQ ID NO: 3671 - DNA, 10 bp, Artificial Sequence
  Synthetic Sequence
ttatgtgaga

SEQ ID NO: 3672 - DNA, 10 bp, Artificial Sequence
  Synthetic Sequence
aagtatacta

SEQ ID NO: 3673 - DNA, 10 bp, Artificial Sequence
  Synthetic Sequence
tgatgtgcct

SEQ ID NO: 3674 - DNA, 10 bp, Artificial Sequence
  Synthetic Sequence
gttgagcttg

SEQ ID NO: 3675 - DNA, 10 bp, Artificial Sequence
  Synthetic Sequence
accagtaccg

SEQ ID NO: 3676 - DNA, 10 bp, Artificial Sequence
  Synthetic Sequence
gctgtaccgt

SEQ ID NO: 3677 - DNA, 10 bp, Artificial Sequence
  Synthetic Sequence
tgggtcggca

SEQ ID NO: 3678 - DNA, 10 bp, Artificial Sequence
  Synthetic Sequence
tactaatcta

SEQ ID NO: 3679 - DNA, 10 bp, Artificial Sequence
  Synthetic Sequence
tgatatccgc

SEQ ID NO: 3680 - DNA, 10 bp, Artificial Sequence
  Synthetic Sequence
tatatagtct

SEQ ID NO: 3681 - DNA, 10 bp, Artificial Sequence
  Synthetic Sequence
ttgttgcttc

SEQ ID NO: 3682 - DNA, 10 bp, Artificial Sequence
  Synthetic Sequence
gtctggaagg

SEQ ID NO: 3683 - DNA, 10 bp, Artificial Sequence
  Synthetic Sequence
gttaactctc

SEQ ID NO: 3684 - DNA, 10 bp, Artificial Sequence
  Synthetic Sequence
cgtagccagg

SEQ ID NO: 3685 - DNA, 10 bp, Artificial Sequence
  Synthetic Sequence
gactataggc

SEQ ID NO: 3686 - DNA, 10 bp, Artificial Sequence
  Synthetic Sequence
actggaaccg

SEQ ID NO: 3687 - DNA, 10 bp, Artificial Sequence
  Synthetic Sequence
ttcttccgag

SEQ ID NO: 3688 - DNA, 10 bp, Artificial Sequence
  Synthetic Sequence
ccttaaatcc

SEQ ID NO: 3689 - DNA, 10 bp, Artificial Sequence
  Synthetic Sequence
acgcctcgca

SEQ ID NO: 3690 - DNA, 10 bp, Artificial Sequence
  Synthetic Sequence
tcccaatgaa

SEQ ID NO: 3691 - DNA, 10 bp, Artificial Sequence
  Synthetic Sequence
tctaggcttt

SEQ ID NO: 3692 - DNA, 10 bp, Artificial Sequence
  Synthetic Sequence
acggacagta

SEQ ID NO: 3693 - DNA, 10 bp, Artificial Sequence
  Synthetic Sequence
actaccacta

SEQ ID NO: 3694 - DNA, 10 bp, Artificial Sequence
  Synthetic Sequence
atcccaactt

SEQ ID NO: 3695 - DNA, 10 bp, Artificial Sequence
  Synthetic Sequence
gaggcaacgg

SEQ ID NO: 3696 - DNA, 10 bp, Artificial Sequence
  Synthetic Sequence
cctatgattt

SEQ ID NO: 3697 - DNA, 10 bp, Artificial Sequence
  Synthetic Sequence
ctcacaatgt

SEQ ID NO: 3698 - DNA, 10 bp, Artificial Sequence
  Synthetic Sequence
tcgatgcgtt

SEQ ID NO: 3699 - DNA, 10 bp, Artificial Sequence
  Synthetic Sequence
atttacgcac

SEQ ID NO: 3700 - DNA, 10 bp, Artificial Sequence
  Synthetic Sequence
ttgttgtaag

SEQ ID NO: 3701 - DNA, 10 bp, Artificial Sequence
  Synthetic Sequence
ctacccttgt

SEQ ID NO: 3702 - DNA, 10 bp, Artificial Sequence
  Synthetic Sequence
tctctcccga

SEQ ID NO: 3703 - DNA, 10 bp, Artificial Sequence
  Synthetic Sequence
ggcaaattca

SEQ ID NO: 3704 - DNA, 10 bp, Artificial Sequence
  Synthetic Sequence
gtatcttagg

SEQ ID NO: 3705 - DNA, 10 bp, Artificial Sequence
  Synthetic Sequence
aaactcgaag

SEQ ID NO: 3706 - DNA, 10 bp, Artificial Sequence
  Synthetic Sequence
gcccttatta

SEQ ID NO: 3707 - DNA, 10 bp, Artificial Sequence
  Synthetic Sequence
ttactagttc

SEQ ID NO: 3708 - DNA, 10 bp, Artificial Sequence
  Synthetic Sequence
ccgctagatc

SEQ ID NO: 3709 - DNA, 10 bp, Artificial Sequence
  Synthetic Sequence
agcaacgaga

SEQ ID NO: 3710 - DNA, 10 bp, Artificial Sequence
  Synthetic Sequence
tctagtccag

SEQ ID NO: 3711 - DNA, 10 bp, Artificial Sequence
  Synthetic Sequence
ggaacggacg

SEQ ID NO: 3712 - DNA, 10 bp, Artificial Sequence
  Synthetic Sequence
gtgttgcacg

SEQ ID NO: 3713 - DNA, 10 bp, Artificial Sequence
  Synthetic Sequence
acgcatctcg

SEQ ID NO: 3714 - DNA, 10 bp, Artificial Sequence
  Synthetic Sequence
gcccatcata

SEQ ID NO: 3715 - DNA, 10 bp, Artificial Sequence
  Synthetic Sequence
gttgtcatct

SEQ ID NO: 3716 - DNA, 10 bp, Artificial Sequence
  Synthetic Sequence
cctttcctga

SEQ ID NO: 3717 - DNA, 10 bp, Artificial Sequence
  Synthetic Sequence
gtttcgatag

SEQ ID NO: 3718 - DNA, 10 bp, Artificial Sequence
  Synthetic Sequence
gggaaatgcg

SEQ ID NO: 3719 - DNA, 10 bp, Artificial Sequence
  Synthetic Sequence
agatcaaggc

SEQ ID NO: 3720 - DNA, 10 bp, Artificial Sequence
  Synthetic Sequence
ccttcccagc

SEQ ID NO: 3721 - DNA, 10 bp, Artificial Sequence
  Synthetic Sequence
ggaaacttgt

SEQ ID NO: 3722 - DNA, 10 bp, Artificial Sequence
  Synthetic Sequence
tattaggaga

SEQ ID NO: 3723 - DNA, 10 bp, Artificial Sequence
  Synthetic Sequence
atcaccctcc

SEQ ID NO: 3724 - DNA, 10 bp, Artificial Sequence
  Synthetic Sequence
ctggtgggct

SEQ ID NO: 3725 - DNA, 10 bp, Artificial Sequence
  Synthetic Sequence
aaggccctca

SEQ ID NO: 3726 - DNA, 10 bp, Artificial Sequence
  Synthetic Sequence
acggtccggt

SEQ ID NO: 3727 - DNA, 10 bp, Artificial Sequence
  Synthetic Sequence
accctatgtc

SEQ ID NO: 3728 - DNA, 10 bp, Artificial Sequence
  Synthetic Sequence
agggaacttc

SEQ ID NO: 3729 - DNA, 10 bp, Artificial Sequence
  Synthetic Sequence
tgattcaacg

SEQ ID NO: 3730 - DNA, 10 bp, Artificial Sequence
  Synthetic Sequence
agacttattc

SEQ ID NO: 3731 - DNA, 10 bp, Artificial Sequence
  Synthetic Sequence
gcctactact

SEQ ID NO: 3732 - DNA, 10 bp, Artificial Sequence
  Synthetic Sequence
aacgcggatc

SEQ ID NO: 3733 - DNA, 10 bp, Artificial Sequence
  Synthetic Sequence
gtcaccttta

SEQ ID NO: 3734 - DNA, 10 bp, Artificial Sequence
  Synthetic Sequence
tggaccagtc

SEQ ID NO: 3735 - DNA, 10 bp, Artificial Sequence
  Synthetic Sequence
gaatgtcacc

SEQ ID NO: 3736 - DNA, 10 bp, Artificial Sequence
  Synthetic Sequence
acttactcag

SEQ ID NO: 3737 - DNA, 10 bp, Artificial Sequence
  Synthetic Sequence
ccctgacgga

SEQ ID NO: 3738 - DNA, 10 bp, Artificial Sequence
  Synthetic Sequence
gctttcagta

SEQ ID NO: 3739 - DNA, 10 bp, Artificial Sequence
  Synthetic Sequence
gccagcctca

SEQ ID NO: 3740 - DNA, 10 bp, Artificial Sequence
  Synthetic Sequence
acaatcacaa

SEQ ID NO: 3741 - DNA, 10 bp, Artificial Sequence
  Synthetic Sequence
cgggatacac

SEQ ID NO: 3742 - DNA, 10 bp, Artificial Sequence
  Synthetic Sequence
gtgatatagg

SEQ ID NO: 3743 - DNA, 10 bp, Artificial Sequence
  Synthetic Sequence
cgtgtctgta

SEQ ID NO: 3744 - DNA, 10 bp, Artificial Sequence
  Synthetic Sequence
tgtgtacgca

SEQ ID NO: 3745 - DNA, 10 bp, Artificial Sequence
  Synthetic Sequence
cgtctattat

SEQ ID NO: 3746 - DNA, 10 bp, Artificial Sequence
  Synthetic Sequence
ggatacgtca

SEQ ID NO: 3747 - DNA, 10 bp, Artificial Sequence
  Synthetic Sequence
tgaccactct

SEQ ID NO: 3748 - DNA, 10 bp, Artificial Sequence
  Synthetic Sequence
atcgatccgg

SEQ ID NO: 3749 - DNA, 10 bp, Artificial Sequence
  Synthetic Sequence
cctcctgata

SEQ ID NO: 3750 - DNA, 10 bp, Artificial Sequence
  Synthetic Sequence
gctataaaca

SEQ ID NO: 3751 - DNA, 10 bp, Artificial Sequence
  Synthetic Sequence
accgctataa

SEQ ID NO: 3752 - DNA, 10 bp, Artificial Sequence
  Synthetic Sequence
ataaaccgaa

SEQ ID NO: 3753 - DNA, 10 bp, Artificial Sequence
  Synthetic Sequence
agcatatcat

SEQ ID NO: 3754 - DNA, 10 bp, Artificial Sequence
  Synthetic Sequence
taccgcacgg

SEQ ID NO: 3755 - DNA, 10 bp, Artificial Sequence
  Synthetic Sequence
ctacagtgat

SEQ ID NO: 3756 - DNA, 10 bp, Artificial Sequence
  Synthetic Sequence
tgtccagtgt

SEQ ID NO: 3757 - DNA, 10 bp, Artificial Sequence
  Synthetic Sequence
ttaaaggaag

SEQ ID NO: 3758 - DNA, 10 bp, Artificial Sequence
  Synthetic Sequence
cacaatcttg

SEQ ID NO: 3759 - DNA, 10 bp, Artificial Sequence
  Synthetic Sequence
atactccatt

SEQ ID NO: 3760 - DNA, 10 bp, Artificial Sequence
  Synthetic Sequence
cgctcgatga

SEQ ID NO: 3761 - DNA, 10 bp, Artificial Sequence
  Synthetic Sequence
attgacccaa

SEQ ID NO: 3762 - DNA, 10 bp, Artificial Sequence
  Synthetic Sequence
ggtgtggctc

SEQ ID NO: 3763 - DNA, 10 bp, Artificial Sequence
  Synthetic Sequence
catgcgcgac

SEQ ID NO: 3764 - DNA, 10 bp, Artificial Sequence
  Synthetic Sequence
ggacatttga

SEQ ID NO: 3765 - DNA, 10 bp, Artificial Sequence
  Synthetic Sequence
tgccagctta

SEQ ID NO: 3766 - DNA, 10 bp, Artificial Sequence
  Synthetic Sequence
atggtctgtc

SEQ ID NO: 3767 - DNA, 10 bp, Artificial Sequence
  Synthetic Sequence
ctctgcgagc

SEQ ID NO: 3768 - DNA, 10 bp, Artificial Sequence
  Synthetic Sequence
aaatcgcacg

SEQ ID NO: 3769 - DNA, 10 bp, Artificial Sequence
  Synthetic Sequence
cacaggatca

SEQ ID NO: 3770 - DNA, 10 bp, Artificial Sequence
  Synthetic Sequence
taacgatgtg

SEQ ID NO: 3771 - DNA, 10 bp, Artificial Sequence
  Synthetic Sequence
tttgccatga

SEQ ID NO: 3772 - DNA, 10 bp, Artificial Sequence
  Synthetic Sequence
gcacagccgt

SEQ ID NO: 3773 - DNA, 10 bp, Artificial Sequence
  Synthetic Sequence
aattcacagc

SEQ ID NO: 3774 - DNA, 10 bp, Artificial Sequence
  Synthetic Sequence
ttgcccaaga

SEQ ID NO: 3775 - DNA, 10 bp, Artificial Sequence
  Synthetic Sequence
ctttgtaaat

SEQ ID NO: 3776 - DNA, 10 bp, Artificial Sequence
  Synthetic Sequence
ggcctgcaga

SEQ ID NO: 3777 - DNA, 10 bp, Artificial Sequence
  Synthetic Sequence
agcggttcag

SEQ ID NO: 3778 - DNA, 10 bp, Artificial Sequence
  Synthetic Sequence
cctggtgaat

SEQ ID NO: 3779 - DNA, 10 bp, Artificial Sequence
  Synthetic Sequence
atgagatgtt

SEQ ID NO: 3780 - DNA, 10 bp, Artificial Sequence
  Synthetic Sequence
gtctaagctg

SEQ ID NO: 3781 - DNA, 10 bp, Artificial Sequence
  Synthetic Sequence
ctaatggctt

SEQ ID NO: 3782 - DNA, 10 bp, Artificial Sequence
  Synthetic Sequence
aggaacgcag

SEQ ID NO: 3783 - DNA, 10 bp, Artificial Sequence
  Synthetic Sequence
tatgggctaa

SEQ ID NO: 3784 - DNA, 10 bp, Artificial Sequence
  Synthetic Sequence
cgttataggt

SEQ ID NO: 3785 - DNA, 10 bp, Artificial Sequence
  Synthetic Sequence
tgttcgttgg

SEQ ID NO: 3786 - DNA, 10 bp, Artificial Sequence
  Synthetic Sequence
tgtgctaggg

SEQ ID NO: 3787 - DNA, 10 bp, Artificial Sequence
  Synthetic Sequence
ttaaacggga

SEQ ID NO: 3788 - DNA, 10 bp, Artificial Sequence
  Synthetic Sequence
ttcgatcgtt

SEQ ID NO: 3789 - DNA, 10 bp, Artificial Sequence
  Synthetic Sequence
cgctaggtcg

SEQ ID NO: 3790 - DNA, 10 bp, Artificial Sequence
  Synthetic Sequence
gtattcttag

SEQ ID NO: 3791 - DNA, 10 bp, Artificial Sequence
  Synthetic Sequence
aagaggaccc

SEQ ID NO: 3792 - DNA, 10 bp, Artificial Sequence
  Synthetic Sequence
atgccaacaa

SEQ ID NO: 3793 - DNA, 10 bp, Artificial Sequence
  Synthetic Sequence
tagtacggct

SEQ ID NO: 3794 - DNA, 10 bp, Artificial Sequence
  Synthetic Sequence
cccggttacc

SEQ ID NO: 3795 - DNA, 10 bp, Artificial Sequence
  Synthetic Sequence
tctacgggaa

SEQ ID NO: 3796 - DNA, 10 bp, Artificial Sequence
  Synthetic Sequence
tcagtgcgcg

SEQ ID NO: 3797 - DNA, 10 bp, Artificial Sequence
  Synthetic Sequence
aattcctgtt

SEQ ID NO: 3798 - DNA, 10 bp, Artificial Sequence
  Synthetic Sequence
gatagcacgc

SEQ ID NO: 3799 - DNA, 10 bp, Artificial Sequence
  Synthetic Sequence
tatggttaat

SEQ ID NO: 3800 - DNA, 10 bp, Artificial Sequence
  Synthetic Sequence
tgttagtaac

SEQ ID NO: 3801 - DNA, 10 bp, Artificial Sequence
  Synthetic Sequence
tgtggcacat

SEQ ID NO: 3802 - DNA, 10 bp, Artificial Sequence
  Synthetic Sequence
aaccagggtt

SEQ ID NO: 3803 - DNA, 10 bp, Artificial Sequence
  Synthetic Sequence
aacgaggacg

SEQ ID NO: 3804 - DNA, 10 bp, Artificial Sequence
  Synthetic Sequence
tggaaagcga

SEQ ID NO: 3805 - DNA, 10 bp, Artificial Sequence
  Synthetic Sequence
acaccgatcg

SEQ ID NO: 3806 - DNA, 10 bp, Artificial Sequence
  Synthetic Sequence
cagtgggttg

SEQ ID NO: 3807 - DNA, 10 bp, Artificial Sequence
  Synthetic Sequence
agacccgtag

SEQ ID NO: 3808 - DNA, 10 bp, Artificial Sequence
  Synthetic Sequence
tgcgctgcct

SEQ ID NO: 3809 - DNA, 10 bp, Artificial Sequence
  Synthetic Sequence
acacacttat

SEQ ID NO: 3810 - DNA, 10 bp, Artificial Sequence
  Synthetic Sequence
cataccgatg

SEQ ID NO: 3811 - DNA, 10 bp, Artificial Sequence
  Synthetic Sequence
tatatgttgc

SEQ ID NO: 3812 - DNA, 10 bp, Artificial Sequence
  Synthetic Sequence
tgtcaccggc

SEQ ID NO: 3813 - DNA, 10 bp, Artificial Sequence
  Synthetic Sequence
aaacacaggg

SEQ ID NO: 3814 - DNA, 10 bp, Artificial Sequence
  Synthetic Sequence
ccattgtaac

SEQ ID NO: 3815 - DNA, 10 bp, Artificial Sequence
  Synthetic Sequence
cctacaatac

SEQ ID NO: 3816 - DNA, 10 bp, Artificial Sequence
  Synthetic Sequence
ctggagcggt

SEQ ID NO: 3817 - DNA, 10 bp, Artificial Sequence
  Synthetic Sequence
aatcgacttc

SEQ ID NO: 3818 - DNA, 10 bp, Artificial Sequence
  Synthetic Sequence
accgaactta

SEQ ID NO: 3819 - DNA, 10 bp, Artificial Sequence
  Synthetic Sequence
actgtagtgt

SEQ ID NO: 3820 - DNA, 10 bp, Artificial Sequence
  Synthetic Sequence
ggcatttact

SEQ ID NO: 3821 - DNA, 10 bp, Artificial Sequence
  Synthetic Sequence
tttgagtgcg

SEQ ID NO: 3822 - DNA, 10 bp, Artificial Sequence
  Synthetic Sequence
aaggctgggc

SEQ ID NO: 3823 - DNA, 10 bp, Artificial Sequence
  Synthetic Sequence
acgatgctca

SEQ ID NO: 3824 - DNA, 10 bp, Artificial Sequence
  Synthetic Sequence
taataccatg

SEQ ID NO: 3825 - DNA, 10 bp, Artificial Sequence
  Synthetic Sequence
cctgcagagt

SEQ ID NO: 3826 - DNA, 10 bp, Artificial Sequence
  Synthetic Sequence
ccgccaagaa

SEQ ID NO: 3827 - DNA, 10 bp, Artificial Sequence
  Synthetic Sequence
cctatggcta

SEQ ID NO: 3828 - DNA, 10 bp, Artificial Sequence
  Synthetic Sequence
ctaaacacct

SEQ ID NO: 3829 - DNA, 10 bp, Artificial Sequence
  Synthetic Sequence
tacccaacca

SEQ ID NO: 3830 - DNA, 10 bp, Artificial Sequence
  Synthetic Sequence
acgtgctacg

SEQ ID NO: 3831 - DNA, 10 bp, Artificial Sequence
  Synthetic Sequence
taaagtgccc

SEQ ID NO: 3832 - DNA, 10 bp, Artificial Sequence
  Synthetic Sequence
acgtcttacc

SEQ ID NO: 3833 - DNA, 10 bp, Artificial Sequence
  Synthetic Sequence
acgcaatttg

SEQ ID NO: 3834 - DNA, 10 bp, Artificial Sequence
  Synthetic Sequence
ctcctattcc

SEQ ID NO: 3835 - DNA, 10 bp, Artificial Sequence
  Synthetic Sequence
gaagaagttc

SEQ ID NO: 3836 - DNA, 10 bp, Artificial Sequence
  Synthetic Sequence
gttccatcac

SEQ ID NO: 3837 - DNA, 10 bp, Artificial Sequence
  Synthetic Sequence
ccacacggtt

SEQ ID NO: 3838 - DNA, 10 bp, Artificial Sequence
  Synthetic Sequence
tacgcgcaag

SEQ ID NO: 3839 - DNA, 10 bp, Artificial Sequence
  Synthetic Sequence
tgtaatcatt

SEQ ID NO: 3840 - DNA, 10 bp, Artificial Sequence
  Synthetic Sequence
taatagatac

SEQ ID NO: 3841 - DNA, 10 bp, Artificial Sequence
  Synthetic Sequence
cctagcggtc

SEQ ID NO: 3842 - DNA, 10 bp, Artificial Sequence
  Synthetic Sequence
ggtactccaa

SEQ ID NO: 3843 - DNA, 10 bp, Artificial Sequence
  Synthetic Sequence
atattacgca

SEQ ID NO: 3844 - DNA, 10 bp, Artificial Sequence
  Synthetic Sequence
gtgccgagct

SEQ ID NO: 3845 - DNA, 10 bp, Artificial Sequence
  Synthetic Sequence
cggtaaggtt

SEQ ID NO: 3846 - DNA, 10 bp, Artificial Sequence
  Synthetic Sequence
tacttaatta

SEQ ID NO: 3847 - DNA, 10 bp, Artificial Sequence
  Synthetic Sequence
ttgcatggcg

SEQ ID NO: 3848 - DNA, 10 bp, Artificial Sequence
  Synthetic Sequence
ggtctgaccg

SEQ ID NO: 3849 - DNA, 10 bp, Artificial Sequence
  Synthetic Sequence
tccagccatt

SEQ ID NO: 3850 - DNA, 10 bp, Artificial Sequence
  Synthetic Sequence
gcacctttac

SEQ ID NO: 3851 - DNA, 10 bp, Artificial Sequence
  Synthetic Sequence
attgcagcga

SEQ ID NO: 3852 - DNA, 10 bp, Artificial Sequence
  Synthetic Sequence
ttcgcatttc

SEQ ID NO: 3853 - DNA, 10 bp, Artificial Sequence
  Synthetic Sequence
aggtgatagt

SEQ ID NO: 3854 - DNA, 10 bp, Artificial Sequence
  Synthetic Sequence
aactcacgga

SEQ ID NO: 3855 - DNA, 10 bp, Artificial Sequence
  Synthetic Sequence
cattatgttc

SEQ ID NO: 3856 - DNA, 10 bp, Artificial Sequence
  Synthetic Sequence
agaggcaaag

SEQ ID NO: 3857 - DNA, 10 bp, Artificial Sequence
  Synthetic Sequence
ttacacctag

SEQ ID NO: 3858 - DNA, 10 bp, Artificial Sequence
  Synthetic Sequence
gcacacgtta

SEQ ID NO: 3859 - DNA, 10 bp, Artificial Sequence
  Synthetic Sequence
aactaaccgt

SEQ ID NO: 3860 - DNA, 10 bp, Artificial Sequence
  Synthetic Sequence
acccgcagta

SEQ ID NO: 3861 - DNA, 10 bp, Artificial Sequence
  Synthetic Sequence
gatcagccat

SEQ ID NO: 3862 - DNA, 10 bp, Artificial Sequence
  Synthetic Sequence
catccttgga

SEQ ID NO: 3863 - DNA, 10 bp, Artificial Sequence
  Synthetic Sequence
ggtattaatt

SEQ ID NO: 3864 - DNA, 10 bp, Artificial Sequence
  Synthetic Sequence
ggcatagcgc

SEQ ID NO: 3865 - DNA, 10 bp, Artificial Sequence
  Synthetic Sequence
ggagttctta

SEQ ID NO: 3866 - DNA, 10 bp, Artificial Sequence
  Synthetic Sequence
gtgcttctgt

SEQ ID NO: 3867 - DNA, 10 bp, Artificial Sequence
  Synthetic Sequence
aagctcccta

SEQ ID NO: 3868 - DNA, 10 bp, Artificial Sequence
  Synthetic Sequence
gcgaacatcg

SEQ ID NO: 3869 - DNA, 10 bp, Artificial Sequence
  Synthetic Sequence
cagcagtcta

SEQ ID NO: 3870 - DNA, 10 bp, Artificial Sequence
  Synthetic Sequence
tccagtattt

SEQ ID NO: 3871 - DNA, 10 bp, Artificial Sequence
  Synthetic Sequence
tcctactgca

SEQ ID NO: 3872 - DNA, 10 bp, Artificial Sequence
  Synthetic Sequence
agtaagaatt

SEQ ID NO: 3873 - DNA, 10 bp, Artificial Sequence
  Synthetic Sequence
cttatttaca

SEQ ID NO: 3874 - DNA, 10 bp, Artificial Sequence
  Synthetic Sequence
gcaaccgggt

SEQ ID NO: 3875 - DNA, 10 bp, Artificial Sequence
  Synthetic Sequence
attcgtaagt

SEQ ID NO: 3876 - DNA, 10 bp, Artificial Sequence
  Synthetic Sequence
gtggacggga

SEQ ID NO: 3877 - DNA, 10 bp, Artificial Sequence
  Synthetic Sequence
acgtgaacta

SEQ ID NO: 3878 - DNA, 10 bp, Artificial Sequence
  Synthetic Sequence
agaagctcgg

SEQ ID NO: 3879 - DNA, 10 bp, Artificial Sequence
  Synthetic Sequence
cctgcagcac

SEQ ID NO: 3880 - DNA, 10 bp, Artificial Sequence
  Synthetic Sequence
tagttcttcg

SEQ ID NO: 3881 - DNA, 10 bp, Artificial Sequence
  Synthetic Sequence
cgagtggctg

SEQ ID NO: 3882 - DNA, 10 bp, Artificial Sequence
  Synthetic Sequence
tgataaatct

SEQ ID NO: 3883 - DNA, 10 bp, Artificial Sequence
  Synthetic Sequence
acgcatgaaa

SEQ ID NO: 3884 - DNA, 10 bp, Artificial Sequence
  Synthetic Sequence
atgcggcgtc

SEQ ID NO: 3885 - DNA, 10 bp, Artificial Sequence
  Synthetic Sequence
agtgcatttg

SEQ ID NO: 3886 - DNA, 10 bp, Artificial Sequence
  Synthetic Sequence
agctagcgcg

SEQ ID NO: 3887 - DNA, 10 bp, Artificial Sequence
  Synthetic Sequence
atggtgccta

SEQ ID NO: 3888 - DNA, 10 bp, Artificial Sequence
  Synthetic Sequence
aaggtgatcc

SEQ ID NO: 3889 - DNA, 10 bp, Artificial Sequence
  Synthetic Sequence
tgaataccat

SEQ ID NO: 3890 - DNA, 10 bp, Artificial Sequence
  Synthetic Sequence
taccctagaa

SEQ ID NO: 3891 - DNA, 10 bp, Artificial Sequence
  Synthetic Sequence
cattgcgggc

SEQ ID NO: 3892 - DNA, 10 bp, Artificial Sequence
  Synthetic Sequence
tcggcgtatg

SEQ ID NO: 3893 - DNA, 10 bp, Artificial Sequence
  Synthetic Sequence
ggcgatagca

SEQ ID NO: 3894 - DNA, 10 bp, Artificial Sequence
  Synthetic Sequence
cagcttggta

SEQ ID NO: 3895 - DNA, 10 bp, Artificial Sequence
  Synthetic Sequence
gggaagcagt

SEQ ID NO: 3896 - DNA, 10 bp, Artificial Sequence
  Synthetic Sequence
ttatgaataa

SEQ ID NO: 3897 - DNA, 10 bp, Artificial Sequence
  Synthetic Sequence
atagcaacct

SEQ ID NO: 3898 - DNA, 10 bp, Artificial Sequence
  Synthetic Sequence
gatgcgagtc

SEQ ID NO: 3899 - DNA, 10 bp, Artificial Sequence
  Synthetic Sequence
cacttgctat

SEQ ID NO: 3900 - DNA, 10 bp, Artificial Sequence
  Synthetic Sequence
agggacccga

SEQ ID NO: 3901 - DNA, 10 bp, Artificial Sequence
  Synthetic Sequence
ggcggtccaa

SEQ ID NO: 3902 - DNA, 10 bp, Artificial Sequence
  Synthetic Sequence
tgggagcagc

SEQ ID NO: 3903 - DNA, 10 bp, Artificial Sequence
  Synthetic Sequence
catgaaaggg

SEQ ID NO: 3904 - DNA, 10 bp, Artificial Sequence
  Synthetic Sequence
ttctgcgaag

SEQ ID NO: 3905 - DNA, 10 bp, Artificial Sequence
  Synthetic Sequence
gcgtttgttc

SEQ ID NO: 3906 - DNA, 10 bp, Artificial Sequence
  Synthetic Sequence
ttgggaccgc

SEQ ID NO: 3907 - DNA, 10 bp, Artificial Sequence
  Synthetic Sequence
ggtagatctc

SEQ ID NO: 3908 - DNA, 10 bp, Artificial Sequence
  Synthetic Sequence
ttagtttgtg

SEQ ID NO: 3909 - DNA, 10 bp, Artificial Sequence
  Synthetic Sequence
ccctctcaaa

SEQ ID NO: 3910 - DNA, 10 bp, Artificial Sequence
  Synthetic Sequence
caactcggac

SEQ ID NO: 3911 - DNA, 10 bp, Artificial Sequence
  Synthetic Sequence
gtgccaatag

SEQ ID NO: 3912 - DNA, 10 bp, Artificial Sequence
  Synthetic Sequence
aagagactgg

SEQ ID NO: 3913 - DNA, 10 bp, Artificial Sequence
  Synthetic Sequence
tttgaaatac

SEQ ID NO: 3914 - DNA, 10 bp, Artificial Sequence
  Synthetic Sequence
ataattactc

SEQ ID NO: 3915 - DNA, 10 bp, Artificial Sequence
  Synthetic Sequence
tcgagaagac

SEQ ID NO: 3916 - DNA, 10 bp, Artificial Sequence
  Synthetic Sequence
gctatcgatt

SEQ ID NO: 3917 - DNA, 10 bp, Artificial Sequence
  Synthetic Sequence
cggatgattg

SEQ ID NO: 3918 - DNA, 10 bp, Artificial Sequence
  Synthetic Sequence
tataatgttt

SEQ ID NO: 3919 - DNA, 10 bp, Artificial Sequence
  Synthetic Sequence
gttctggcca

SEQ ID NO: 3920 - DNA, 10 bp, Artificial Sequence
  Synthetic Sequence
atcagttggg

SEQ ID NO: 3921 - DNA, 10 bp, Artificial Sequence
  Synthetic Sequence
ctcacgcacg

SEQ ID NO: 3922 - DNA, 10 bp, Artificial Sequence
  Synthetic Sequence
tctatctatg

SEQ ID NO: 3923 - DNA, 10 bp, Artificial Sequence
  Synthetic Sequence
gacacgatgg

SEQ ID NO: 3924 - DNA, 10 bp, Artificial Sequence
  Synthetic Sequence
tcagagcaag

SEQ ID NO: 3925 - DNA, 10 bp, Artificial Sequence
  Synthetic Sequence
actgcttagc

SEQ ID NO: 3926 - DNA, 10 bp, Artificial Sequence
  Synthetic Sequence
gctgagagac

SEQ ID NO: 3927 - DNA, 10 bp, Artificial Sequence
  Synthetic Sequence
ctcagttcga

SEQ ID NO: 3928 - DNA, 10 bp, Artificial Sequence
  Synthetic Sequence
atcttctctg

SEQ ID NO: 3929 - DNA, 10 bp, Artificial Sequence
  Synthetic Sequence
tttccttgct

SEQ ID NO: 3930 - DNA, 10 bp, Artificial Sequence
  Synthetic Sequence
agaaaggccg

SEQ ID NO: 3931 - DNA, 10 bp, Artificial Sequence
  Synthetic Sequence
ctggctgcta

SEQ ID NO: 3932 - DNA, 10 bp, Artificial Sequence
  Synthetic Sequence
catcacttga

SEQ ID NO: 3933 - DNA, 10 bp, Artificial Sequence
  Synthetic Sequence
gacccataag

SEQ ID NO: 3934 - DNA, 10 bp, Artificial Sequence
  Synthetic Sequence
caggaaagat

SEQ ID NO: 3935 - DNA, 10 bp, Artificial Sequence
  Synthetic Sequence
gagccctacg

SEQ ID NO: 3936 - DNA, 10 bp, Artificial Sequence
  Synthetic Sequence
agtgagttgg

SEQ ID NO: 3937 - DNA, 10 bp, Artificial Sequence
  Synthetic Sequence
gccaatgctg

SEQ ID NO: 3938 - DNA, 10 bp, Artificial Sequence
  Synthetic Sequence
accggccgtt

SEQ ID NO: 3939 - DNA, 10 bp, Artificial Sequence
  Synthetic Sequence
gaagctgcca

SEQ ID NO: 3940 - DNA, 10 bp, Artificial Sequence
  Synthetic Sequence
ggctacactt

SEQ ID NO: 3941 - DNA, 10 bp, Artificial Sequence
  Synthetic Sequence
tgtcagaatc

SEQ ID NO: 3942 - DNA, 10 bp, Artificial Sequence
  Synthetic Sequence
tctcagccac

SEQ ID NO: 3943 - DNA, 10 bp, Artificial Sequence
  Synthetic Sequence
accgcctcag

SEQ ID NO: 3944 - DNA, 10 bp, Artificial Sequence
  Synthetic Sequence
tataggtgaa

SEQ ID NO: 3945 - DNA, 10 bp, Artificial Sequence
  Synthetic Sequence
taatcgcatc

SEQ ID NO: 3946 - DNA, 10 bp, Artificial Sequence
  Synthetic Sequence
tcgccactcc

SEQ ID NO: 3947 - DNA, 10 bp, Artificial Sequence
  Synthetic Sequence
gaagctttct

SEQ ID NO: 3948 - DNA, 10 bp, Artificial Sequence
  Synthetic Sequence
gggacgcaca

SEQ ID NO: 3949 - DNA, 10 bp, Artificial Sequence
  Synthetic Sequence
gattagttgc

SEQ ID NO: 3950 - DNA, 10 bp, Artificial Sequence
  Synthetic Sequence
ggattatcct

SEQ ID NO: 3951 - DNA, 10 bp, Artificial Sequence
  Synthetic Sequence
ttatggcggg

SEQ ID NO: 3952 - DNA, 10 bp, Artificial Sequence
  Synthetic Sequence
ggacacacgg

SEQ ID NO: 3953 - DNA, 10 bp, Artificial Sequence
  Synthetic Sequence
actgatgcgg

SEQ ID NO: 3954 - DNA, 10 bp, Artificial Sequence
  Synthetic Sequence
ggttccgtcc

SEQ ID NO: 3955 - DNA, 10 bp, Artificial Sequence
  Synthetic Sequence
ccagctactg

SEQ ID NO: 3956 - DNA, 10 bp, Artificial Sequence
  Synthetic Sequence
acatccgttt

SEQ ID NO: 3957 - DNA, 10 bp, Artificial Sequence
  Synthetic Sequence
tggtaatatt

SEQ ID NO: 3958 - DNA, 10 bp, Artificial Sequence
  Synthetic Sequence
tatttctcct

SEQ ID NO: 3959 - DNA, 10 bp, Artificial Sequence
  Synthetic Sequence
acgtgtccgt

SEQ ID NO: 3960 - DNA, 10 bp, Artificial Sequence
  Synthetic Sequence
ctcaatgtat

SEQ ID NO: 3961 - DNA, 10 bp, Artificial Sequence
  Synthetic Sequence
aaagtccagg

SEQ ID NO: 3962 - DNA, 10 bp, Artificial Sequence
  Synthetic Sequence
cggagacaga

SEQ ID NO: 3963 - DNA, 10 bp, Artificial Sequence
  Synthetic Sequence
tttgcttcaa

SEQ ID NO: 3964 - DNA, 10 bp, Artificial Sequence
  Synthetic Sequence
tagaacttag

SEQ ID NO: 3965 - DNA, 10 bp, Artificial Sequence
  Synthetic Sequence
agagatcact

SEQ ID NO: 3966 - DNA, 10 bp, Artificial Sequence
  Synthetic Sequence
tgcgtaggct

SEQ ID NO: 3967 - DNA, 10 bp, Artificial Sequence
  Synthetic Sequence
gtgtgactta

SEQ ID NO: 3968 - DNA, 10 bp, Artificial Sequence
  Synthetic Sequence
tggtttctaa

SEQ ID NO: 3969 - DNA, 10 bp, Artificial Sequence
  Synthetic Sequence
ccaagtattc

SEQ ID NO: 3970 - DNA, 10 bp, Artificial Sequence
  Synthetic Sequence
tgcgtcgcac

SEQ ID NO: 3971 - DNA, 10 bp, Artificial Sequence
  Synthetic Sequence
aaagttgttc

SEQ ID NO: 3972 - DNA, 10 bp, Artificial Sequence
  Synthetic Sequence
aaccgaccca

SEQ ID NO: 3973 - DNA, 10 bp, Artificial Sequence
  Synthetic Sequence
cttaatacgc

SEQ ID NO: 3974 - DNA, 10 bp, Artificial Sequence
  Synthetic Sequence
accgcagcca

SEQ ID NO: 3975 - DNA, 10 bp, Artificial Sequence
  Synthetic Sequence
gtaaagtgga

SEQ ID NO: 3976 - DNA, 10 bp, Artificial Sequence
  Synthetic Sequence
acacaaagga

SEQ ID NO: 3977 - DNA, 10 bp, Artificial Sequence
  Synthetic Sequence
tggagtgcgc

SEQ ID NO: 3978 - DNA, 10 bp, Artificial Sequence
  Synthetic Sequence
ctcgagtata

SEQ ID NO: 3979 - DNA, 10 bp, Artificial Sequence
  Synthetic Sequence
agttaacgac

SEQ ID NO: 3980 - DNA, 10 bp, Artificial Sequence
  Synthetic Sequence
gacttatgag

SEQ ID NO: 3981 - DNA, 10 bp, Artificial Sequence
  Synthetic Sequence
ggtggctaat

SEQ ID NO: 3982 - DNA, 10 bp, Artificial Sequence
  Synthetic Sequence
tcacgcatgt

SEQ ID NO: 3983 - DNA, 10 bp, Artificial Sequence
  Synthetic Sequence
ggaccgtctg

SEQ ID NO: 3984 - DNA, 10 bp, Artificial Sequence
  Synthetic Sequence
gctagtacac

SEQ ID NO: 3985 - DNA, 10 bp, Artificial Sequence
  Synthetic Sequence
agtttggtaa

SEQ ID NO: 3986 - DNA, 10 bp, Artificial Sequence
  Synthetic Sequence
agagaagagc

SEQ ID NO: 3987 - DNA, 10 bp, Artificial Sequence
  Synthetic Sequence
tatataacat

SEQ ID NO: 3988 - DNA, 10 bp, Artificial Sequence
  Synthetic Sequence
gtttcaagtg

SEQ ID NO: 3989 - DNA, 10 bp, Artificial Sequence
  Synthetic Sequence
ctcaacggta

SEQ ID NO: 3990 - DNA, 10 bp, Artificial Sequence
  Synthetic Sequence
gaatgctttg

SEQ ID NO: 3991 - DNA, 10 bp, Artificial Sequence
  Synthetic Sequence
ccaagggtcg

SEQ ID NO: 3992 - DNA, 10 bp, Artificial Sequence
  Synthetic Sequence
ttcatcagtt

SEQ ID NO: 3993 - DNA, 10 bp, Artificial Sequence
  Synthetic Sequence
ctttcagtcg

SEQ ID NO: 3994 - DNA, 10 bp, Artificial Sequence
  Synthetic Sequence
gtaatgggaa

SEQ ID NO: 3995 - DNA, 10 bp, Artificial Sequence
  Synthetic Sequence
cggaagtcgc

SEQ ID NO: 3996 - DNA, 10 bp, Artificial Sequence
  Synthetic Sequence
aagtgtatgt

SEQ ID NO: 3997 - DNA, 10 bp, Artificial Sequence
  Synthetic Sequence
tttgtcaata

SEQ ID NO: 3998 - DNA, 10 bp, Artificial Sequence
  Synthetic Sequence
agagccagca

SEQ ID NO: 3999 - DNA, 10 bp, Artificial Sequence
  Synthetic Sequence
gtcaacctat

SEQ ID NO: 4000 - DNA, 10 bp, Artificial Sequence
  Synthetic Sequence
tataaatata

SEQ ID NO: 4001 - DNA, 10 bp, Artificial Sequence
  Synthetic Sequence
gagatttata

SEQ ID NO: 4002 - DNA, 10 bp, Artificial Sequence
  Synthetic Sequence
caaggacaag

SEQ ID NO: 4003 - DNA, 10 bp, Artificial Sequence
  Synthetic Sequence
agcgatcggc

SEQ ID NO: 4004 - DNA, 10 bp, Artificial Sequence
  Synthetic Sequence
agaacactcc

SEQ ID NO: 4005 - DNA, 10 bp, Artificial Sequence
  Synthetic Sequence
tagggtgctc

SEQ ID NO: 4006 - DNA, 10 bp, Artificial Sequence
  Synthetic Sequence
atgggtttct

SEQ ID NO: 4007 - DNA, 10 bp, Artificial Sequence
  Synthetic Sequence
tgaatatgag

SEQ ID NO: 4008 - DNA, 10 bp, Artificial Sequence
  Synthetic Sequence
caatggacac

SEQ ID NO: 4009 - DNA, 10 bp, Artificial Sequence
  Synthetic Sequence
ctagtgctac

SEQ ID NO: 4010 - DNA, 10 bp, Artificial Sequence
  Synthetic Sequence
taggttagat

SEQ ID NO: 4011 - DNA, 10 bp, Artificial Sequence
  Synthetic Sequence
cacttctggc

SEQ ID NO: 4012 - DNA, 10 bp, Artificial Sequence
  Synthetic Sequence
cttctgactt

SEQ ID NO: 4013 - DNA, 10 bp, Artificial Sequence
  Synthetic Sequence
acacttacga

SEQ ID NO: 4014 - DNA, 10 bp, Artificial Sequence
  Synthetic Sequence
cgcaaacgaa

SEQ ID NO: 4015 - DNA, 10 bp, Artificial Sequence
  Synthetic Sequence
tcgaacatgt

SEQ ID NO: 4016 - DNA, 10 bp, Artificial Sequence
  Synthetic Sequence
agcgtgcgtt

SEQ ID NO: 4017 - DNA, 10 bp, Artificial Sequence
  Synthetic Sequence
gttcaattga

SEQ ID NO: 4018 - DNA, 10 bp, Artificial Sequence
  Synthetic Sequence
gctgtccacc

SEQ ID NO: 4019 - DNA, 10 bp, Artificial Sequence
  Synthetic Sequence
caaaggagtg

SEQ ID NO: 4020 - DNA, 10 bp, Artificial Sequence
  Synthetic Sequence
cgaacgcgga

SEQ ID NO: 4021 - DNA, 10 bp, Artificial Sequence
  Synthetic Sequence
tggcgacacc

SEQ ID NO: 4022 - DNA, 10 bp, Artificial Sequence
  Synthetic Sequence
aacctcactg

SEQ ID NO: 4023 - DNA, 10 bp, Artificial Sequence
  Synthetic Sequence
tgccggtttg

SEQ ID NO: 4024 - DNA, 10 bp, Artificial Sequence
  Synthetic Sequence
ggagcccttc

SEQ ID NO: 4025 - DNA, 10 bp, Artificial Sequence
  Synthetic Sequence
tcttccagac

SEQ ID NO: 4026 - DNA, 10 bp, Artificial Sequence
  Synthetic Sequence
ctttcattat

SEQ ID NO: 4027 - DNA, 10 bp, Artificial Sequence
  Synthetic Sequence
tgttctctat

SEQ ID NO: 4028 - DNA, 10 bp, Artificial Sequence
  Synthetic Sequence
gcatcggcct

SEQ ID NO: 4029 - DNA, 10 bp, Artificial Sequence
  Synthetic Sequence
gtgcgggtga

SEQ ID NO: 4030 - DNA, 10 bp, Artificial Sequence
  Synthetic Sequence
ttacgcagct

SEQ ID NO: 4031 - DNA, 10 bp, Artificial Sequence
  Synthetic Sequence
tcgctgtgtc

SEQ ID NO: 4032 - DNA, 10 bp, Artificial Sequence
  Synthetic Sequence
ccgggtaagc

SEQ ID NO: 4033 - DNA, 10 bp, Artificial Sequence
  Synthetic Sequence
cgggttgatc

SEQ ID NO: 4034 - DNA, 10 bp, Artificial Sequence
  Synthetic Sequence
ctgccgcatt

SEQ ID NO: 4035 - DNA, 10 bp, Artificial Sequence
  Synthetic Sequence
gcacttcgtg

SEQ ID NO: 4036 - DNA, 10 bp, Artificial Sequence
  Synthetic Sequence
taaggcgagc

SEQ ID NO: 4037 - DNA, 10 bp, Artificial Sequence
  Synthetic Sequence
ctacactccc

SEQ ID NO: 4038 - DNA, 10 bp, Artificial Sequence
  Synthetic Sequence
agcgtgttga

SEQ ID NO: 4039 - DNA, 10 bp, Artificial Sequence
  Synthetic Sequence
tacgtgcccg

SEQ ID NO: 4040 - DNA, 10 bp, Artificial Sequence
  Synthetic Sequence
gatgtcgcgg

SEQ ID NO: 4041 - DNA, 10 bp, Artificial Sequence
  Synthetic Sequence
gactgtctag

SEQ ID NO: 4042 - DNA, 10 bp, Artificial Sequence
  Synthetic Sequence
ctatccgctc

SEQ ID NO: 4043 - DNA, 10 bp, Artificial Sequence
  Synthetic Sequence
gctaattgtt

SEQ ID NO: 4044 - DNA, 10 bp, Artificial Sequence
  Synthetic Sequence
tatagatacg

SEQ ID NO: 4045 - DNA, 10 bp, Artificial Sequence
  Synthetic Sequence
atcctggctg

SEQ ID NO: 4046 - DNA, 10 bp, Artificial Sequence
  Synthetic Sequence
ttaagcctgg

SEQ ID NO: 4047 - DNA, 10 bp, Artificial Sequence
  Synthetic Sequence
tttgatactc

SEQ ID NO: 4048 - DNA, 10 bp, Artificial Sequence
  Synthetic Sequence
gtgatccgga

SEQ ID NO: 4049 - DNA, 10 bp, Artificial Sequence
  Synthetic Sequence
tagaaggagg

SEQ ID NO: 4050 - DNA, 10 bp, Artificial Sequence
  Synthetic Sequence
cagaatgagt

SEQ ID NO: 4051 - DNA, 10 bp, Artificial Sequence
  Synthetic Sequence
ctgggaagcc

SEQ ID NO: 4052 - DNA, 10 bp, Artificial Sequence
  Synthetic Sequence
ttcctaaacg

SEQ ID NO: 4053 - DNA, 10 bp, Artificial Sequence
  Synthetic Sequence
tcactcccag

SEQ ID NO: 4054 - DNA, 10 bp, Artificial Sequence
  Synthetic Sequence
ggccgtatga

SEQ ID NO: 4055 - DNA, 10 bp, Artificial Sequence
  Synthetic Sequence
tggtagttgc

SEQ ID NO: 4056 - DNA, 10 bp, Artificial Sequence
  Synthetic Sequence
tgccatgtat

SEQ ID NO: 4057 - DNA, 10 bp, Artificial Sequence
  Synthetic Sequence
cccggcgatt

SEQ ID NO: 4058 - DNA, 10 bp, Artificial Sequence
  Synthetic Sequence
tttagctcct

SEQ ID NO: 4059 - DNA, 10 bp, Artificial Sequence
  Synthetic Sequence
aggcgccaat

SEQ ID NO: 4060 - DNA, 10 bp, Artificial Sequence
  Synthetic Sequence
ttccgctcta

SEQ ID NO: 4061 - DNA, 10 bp, Artificial Sequence
  Synthetic Sequence
ttacctaggg

SEQ ID NO: 4062 - DNA, 10 bp, Artificial Sequence
  Synthetic Sequence
agtgcttaca

SEQ ID NO: 4063 - DNA, 10 bp, Artificial Sequence
  Synthetic Sequence
catctcgcat

SEQ ID NO: 4064 - DNA, 10 bp, Artificial Sequence
  Synthetic Sequence
agggccatcg

SEQ ID NO: 4065 - DNA, 10 bp, Artificial Sequence
  Synthetic Sequence
gccggtacta

SEQ ID NO: 4066 - DNA, 10 bp, Artificial Sequence
  Synthetic Sequence
cgtctgcgac

SEQ ID NO: 4067 - DNA, 10 bp, Artificial Sequence
  Synthetic Sequence
atatgtctat

SEQ ID NO: 4068 - DNA, 10 bp, Artificial Sequence
  Synthetic Sequence
ccggactttc

SEQ ID NO: 4069 - DNA, 10 bp, Artificial Sequence
  Synthetic Sequence
gcctagcttt

SEQ ID NO: 4070 - DNA, 10 bp, Artificial Sequence
  Synthetic Sequence
agtgtactgc

SEQ ID NO: 4071 - DNA, 10 bp, Artificial Sequence
  Synthetic Sequence
ccgcaattgc

SEQ ID NO: 4072 - DNA, 10 bp, Artificial Sequence
  Synthetic Sequence
gaattatctg

SEQ ID NO: 4073 - DNA, 10 bp, Artificial Sequence
  Synthetic Sequence
aagttataag

SEQ ID NO: 4074 - DNA, 10 bp, Artificial Sequence
  Synthetic Sequence
actggaagat

SEQ ID NO: 4075 - DNA, 10 bp, Artificial Sequence
  Synthetic Sequence
cagatctttc

SEQ ID NO: 4076 - DNA, 10 bp, Artificial Sequence
  Synthetic Sequence
actgtgtagg

SEQ ID NO: 4077 - DNA, 10 bp, Artificial Sequence
  Synthetic Sequence
atcgtaaatg

SEQ ID NO: 4078 - DNA, 10 bp, Artificial Sequence
  Synthetic Sequence
tagcatgctt

SEQ ID NO: 4079 - DNA, 10 bp, Artificial Sequence
  Synthetic Sequence
cgatgtcgac

SEQ ID NO: 4080 - DNA, 10 bp, Artificial Sequence
  Synthetic Sequence
gcatggccta

SEQ ID NO: 4081 - DNA, 10 bp, Artificial Sequence
  Synthetic Sequence
tttagcatta

SEQ ID NO: 4082 - DNA, 10 bp, Artificial Sequence
  Synthetic Sequence
gcaacgtcca

SEQ ID NO: 4083 - DNA, 10 bp, Artificial Sequence
  Synthetic Sequence
ctcctggacg

SEQ ID NO: 4084 - DNA, 10 bp, Artificial Sequence
  Synthetic Sequence
gtgacatcca

SEQ ID NO: 4085 - DNA, 10 bp, Artificial Sequence
  Synthetic Sequence
gccttccgac

SEQ ID NO: 4086 - DNA, 10 bp, Artificial Sequence
  Synthetic Sequence
tagagttaag

SEQ ID NO: 4087 - DNA, 10 bp, Artificial Sequence
  Synthetic Sequence
cgcgtacgtg

SEQ ID NO: 4088 - DNA, 10 bp, Artificial Sequence
  Synthetic Sequence
gaccgaaatg

SEQ ID NO: 4089 - DNA, 10 bp, Artificial Sequence
  Synthetic Sequence
cttggagcta

SEQ ID NO: 4090 - DNA, 10 bp, Artificial Sequence
  Synthetic Sequence
actccatcta

SEQ ID NO: 4091 - DNA, 10 bp, Artificial Sequence
  Synthetic Sequence
cttcgctagg

SEQ ID NO: 4092 - DNA, 10 bp, Artificial Sequence
  Synthetic Sequence
gagtagccta

SEQ ID NO: 4093 - DNA, 10 bp, Artificial Sequence
  Synthetic Sequence
aaatcttaaa

SEQ ID NO: 4094 - DNA, 10 bp, Artificial Sequence
  Synthetic Sequence
ctaaatctgt

SEQ ID NO: 4095 - DNA, 10 bp, Artificial Sequence
  Synthetic Sequence
atacactaaa

SEQ ID NO: 4096 - DNA, 10 bp, Artificial Sequence
  Synthetic Sequence
agtcttccgc

SEQ ID NO: 4097 - DNA, 10 bp, Artificial Sequence
  Synthetic Sequence
ctacttgatg

SEQ ID NO: 4098 - DNA, 10 bp, Artificial Sequence
  Synthetic Sequence
atttattcta

SEQ ID NO: 4099 - DNA, 10 bp, Artificial Sequence
  Synthetic Sequence
aggacggcat

SEQ ID NO: 4100 - DNA, 10 bp, Artificial Sequence
  Synthetic Sequence
atcgtgcaga

SEQ ID NO: 4101 - DNA, 10 bp, Artificial Sequence
  Synthetic Sequence
gcctacgtcc

SEQ ID NO: 4102 - DNA, 10 bp, Artificial Sequence
  Synthetic Sequence
atggccatgt

SEQ ID NO: 4103 - DNA, 10 bp, Artificial Sequence
  Synthetic Sequence
taatcgcgaa

SEQ ID NO: 4104 - DNA, 10 bp, Artificial Sequence
  Synthetic Sequence
aatttacggg

SEQ ID NO: 4105 - DNA, 10 bp, Artificial Sequence
  Synthetic Sequence
caaatcttat

SEQ ID NO: 4106 - DNA, 10 bp, Artificial Sequence
  Synthetic Sequence
gtgagtttaa

SEQ ID NO: 4107 - DNA, 10 bp, Artificial Sequence
  Synthetic Sequence
agtagcgcgc

SEQ ID NO: 4108 - DNA, 10 bp, Artificial Sequence
  Synthetic Sequence
tctattggca

SEQ ID NO: 4109 - DNA, 10 bp, Artificial Sequence
  Synthetic Sequence
tgtggtctgg

SEQ ID NO: 4110 - DNA, 10 bp, Artificial Sequence
  Synthetic Sequence
tcgcgaaatg

SEQ ID NO: 4111 - DNA, 10 bp, Artificial Sequence
  Synthetic Sequence
tttctaaggt

SEQ ID NO: 4112 - DNA, 10 bp, Artificial Sequence
  Synthetic Sequence
atcacgatac

SEQ ID NO: 4113 - DNA, 10 bp, Artificial Sequence
  Synthetic Sequence
tgttgaaata

SEQ ID NO: 4114 - DNA, 10 bp, Artificial Sequence
  Synthetic Sequence
tacgatcatg

SEQ ID NO: 4115 - DNA, 10 bp, Artificial Sequence
  Synthetic Sequence
tgcagcccaa

SEQ ID NO: 4116 - DNA, 10 bp, Artificial Sequence
  Synthetic Sequence
acaacgcgaa

SEQ ID NO: 4117 - DNA, 10 bp, Artificial Sequence
  Synthetic Sequence
gagcgagcca

SEQ ID NO: 4118 - DNA, 10 bp, Artificial Sequence
  Synthetic Sequence
gctgctgtta

SEQ ID NO: 4119 - DNA, 10 bp, Artificial Sequence
  Synthetic Sequence
gtcgggactg

SEQ ID NO: 4120 - DNA, 10 bp, Artificial Sequence
  Synthetic Sequence
tctacgccgc

SEQ ID NO: 4121 - DNA, 10 bp, Artificial Sequence
  Synthetic Sequence
ctcatttaac

SEQ ID NO: 4122 - DNA, 10 bp, Artificial Sequence
  Synthetic Sequence
cgattctctt

SEQ ID NO: 4123 - DNA, 10 bp, Artificial Sequence
  Synthetic Sequence
gagaaagtag

SEQ ID NO: 4124 - DNA, 10 bp, Artificial Sequence
  Synthetic Sequence
gtggactccc

SEQ ID NO: 4125 - DNA, 10 bp, Artificial Sequence
  Synthetic Sequence
taggcctccc

SEQ ID NO: 4126 - DNA, 10 bp, Artificial Sequence
  Synthetic Sequence
cattcccggg

SEQ ID NO: 4127 - DNA, 10 bp, Artificial Sequence
  Synthetic Sequence
cttcttcgag

SEQ ID NO: 4128 - DNA, 10 bp, Artificial Sequence
  Synthetic Sequence
gtatagatct

SEQ ID NO: 4129 - DNA, 10 bp, Artificial Sequence
  Synthetic Sequence
caaatggtac

SEQ ID NO: 4130 - DNA, 10 bp, Artificial Sequence
  Synthetic Sequence
atagacagag

SEQ ID NO: 4131 - DNA, 10 bp, Artificial Sequence
  Synthetic Sequence
ttgtaaagcc

SEQ ID NO: 4132 - DNA, 10 bp, Artificial Sequence
  Synthetic Sequence
ttaactgatt

SEQ ID NO: 4133 - DNA, 10 bp, Artificial Sequence
  Synthetic Sequence
cctgatagaa

SEQ ID NO: 4134 - DNA, 10 bp, Artificial Sequence
  Synthetic Sequence
gactgggctg

SEQ ID NO: 4135 - DNA, 10 bp, Artificial Sequence
  Synthetic Sequence
ggagctcgag

SEQ ID NO: 4136 - DNA, 10 bp, Artificial Sequence
  Synthetic Sequence
aagaacttga

SEQ ID NO: 4137 - DNA, 10 bp, Artificial Sequence
  Synthetic Sequence
tggaaatcct

SEQ ID NO: 4138 - DNA, 10 bp, Artificial Sequence
  Synthetic Sequence
aaactctata

SEQ ID NO: 4139 - DNA, 10 bp, Artificial Sequence
  Synthetic Sequence
ccgaataatc

SEQ ID NO: 4140 - DNA, 10 bp, Artificial Sequence
  Synthetic Sequence
ctgattgtgg

SEQ ID NO: 4141 - DNA, 10 bp, Artificial Sequence
  Synthetic Sequence
aatttggttc

SEQ ID NO: 4142 - DNA, 10 bp, Artificial Sequence
  Synthetic Sequence
aatctagagg

SEQ ID NO: 4143 - DNA, 10 bp, Artificial Sequence
  Synthetic Sequence
caaacaacgt

SEQ ID NO: 4144 - DNA, 10 bp, Artificial Sequence
  Synthetic Sequence
ccggcattaa

SEQ ID NO: 4145 - DNA, 10 bp, Artificial Sequence
  Synthetic Sequence
aacaaatttg

SEQ ID NO: 4146 - DNA, 10 bp, Artificial Sequence
  Synthetic Sequence
cagccgacaa

SEQ ID NO: 4147 - DNA, 10 bp, Artificial Sequence
  Synthetic Sequence
caatgcgtac

SEQ ID NO: 4148 - DNA, 10 bp, Artificial Sequence
  Synthetic Sequence
tggacacgac

SEQ ID NO: 4149 - DNA, 10 bp, Artificial Sequence
  Synthetic Sequence
tgtggcgagg

SEQ ID NO: 4150 - DNA, 10 bp, Artificial Sequence
  Synthetic Sequence
atcccatcgc

SEQ ID NO: 4151 - DNA, 10 bp, Artificial Sequence
  Synthetic Sequence
gcggaccatc

SEQ ID NO: 4152 - DNA, 10 bp, Artificial Sequence
  Synthetic Sequence
tcaatacgcc

SEQ ID NO: 4153 - DNA, 10 bp, Artificial Sequence
  Synthetic Sequence
gctttgcgtt

SEQ ID NO: 4154 - DNA, 10 bp, Artificial Sequence
  Synthetic Sequence
cggattgacg

SEQ ID NO: 4155 - DNA, 10 bp, Artificial Sequence
  Synthetic Sequence
ctagtcctga

SEQ ID NO: 4156 - DNA, 10 bp, Artificial Sequence
  Synthetic Sequence
ggtaacaagg

SEQ ID NO: 4157 - DNA, 10 bp, Artificial Sequence
  Synthetic Sequence
cccgacgtta

SEQ ID NO: 4158 - DNA, 10 bp, Artificial Sequence
  Synthetic Sequence
ttcgtggagc

SEQ ID NO: 4159 - DNA, 10 bp, Artificial Sequence
  Synthetic Sequence
ataagatgcc

SEQ ID NO: 4160 - DNA, 10 bp, Artificial Sequence
  Synthetic Sequence
gtggagtggg

SEQ ID NO: 4161 - DNA, 10 bp, Artificial Sequence
  Synthetic Sequence
tgctatgagc

SEQ ID NO: 4162 - DNA, 10 bp, Artificial Sequence
  Synthetic Sequence
tgcaaagcac

SEQ ID NO: 4163 - DNA, 10 bp, Artificial Sequence
  Synthetic Sequence
acctttggcc

SEQ ID NO: 4164 - DNA, 10 bp, Artificial Sequence
  Synthetic Sequence
cccgcaatca

SEQ ID NO: 4165 - DNA, 10 bp, Artificial Sequence
  Synthetic Sequence
atccactgca

SEQ ID NO: 4166 - DNA, 10 bp, Artificial Sequence
  Synthetic Sequence
atcggcgctc

SEQ ID NO: 4167 - DNA, 10 bp, Artificial Sequence
  Synthetic Sequence
cctatcgcgt

SEQ ID NO: 4168 - DNA, 10 bp, Artificial Sequence
  Synthetic Sequence
tgacatcccg

SEQ ID NO: 4169 - DNA, 10 bp, Artificial Sequence
  Synthetic Sequence
gcatagtatc

SEQ ID NO: 4170 - DNA, 10 bp, Artificial Sequence
  Synthetic Sequence
tgttgtagtt

SEQ ID NO: 4171 - DNA, 10 bp, Artificial Sequence
  Synthetic Sequence
tagtaacctc

SEQ ID NO: 4172 - DNA, 10 bp, Artificial Sequence
  Synthetic Sequence
aggtcgtcta

SEQ ID NO: 4173 - DNA, 10 bp, Artificial Sequence
  Synthetic Sequence
attagacacc

SEQ ID NO: 4174 - DNA, 10 bp, Artificial Sequence
  Synthetic Sequence
ttcccactat

SEQ ID NO: 4175 - DNA, 10 bp, Artificial Sequence
  Synthetic Sequence
tccaccaccg

SEQ ID NO: 4176 - DNA, 10 bp, Artificial Sequence
  Synthetic Sequence
attacgctca

SEQ ID NO: 4177 - DNA, 10 bp, Artificial Sequence
  Synthetic Sequence
tatggtgtta

SEQ ID NO: 4178 - DNA, 10 bp, Artificial Sequence
  Synthetic Sequence
tatttgagat

SEQ ID NO: 4179 - DNA, 10 bp, Artificial Sequence
  Synthetic Sequence
atcccgcgta

SEQ ID NO: 4180 - DNA, 10 bp, Artificial Sequence
  Synthetic Sequence
tcggccacct

SEQ ID NO: 4181 - DNA, 10 bp, Artificial Sequence
  Synthetic Sequence
gtcttcccat

SEQ ID NO: 4182 - DNA, 10 bp, Artificial Sequence
  Synthetic Sequence
agtacccgcc

SEQ ID NO: 4183 - DNA, 10 bp, Artificial Sequence
  Synthetic Sequence
tacctcaaca

SEQ ID NO: 4184 - DNA, 10 bp, Artificial Sequence
  Synthetic Sequence
agtcccagtg

SEQ ID NO: 4185 - DNA, 10 bp, Artificial Sequence
  Synthetic Sequence
acattggagt

SEQ ID NO: 4186 - DNA, 10 bp, Artificial Sequence
  Synthetic Sequence
ctgacagttg

SEQ ID NO: 4187 - DNA, 10 bp, Artificial Sequence
  Synthetic Sequence
atgagcatcg

SEQ ID NO: 4188 - DNA, 10 bp, Artificial Sequence
  Synthetic Sequence
ctcccaagga

SEQ ID NO: 4189 - DNA, 10 bp, Artificial Sequence
  Synthetic Sequence
aatcaagcca

SEQ ID NO: 4190 - DNA, 10 bp, Artificial Sequence
  Synthetic Sequence
gtcgagggca

SEQ ID NO: 4191 - DNA, 10 bp, Artificial Sequence
  Synthetic Sequence
cgtcgttcag

SEQ ID NO: 4192 - DNA, 10 bp, Artificial Sequence
  Synthetic Sequence
gagtcccacc

SEQ ID NO: 4193 - DNA, 10 bp, Artificial Sequence
  Synthetic Sequence
tttaggctgc

SEQ ID NO: 4194 - DNA, 10 bp, Artificial Sequence
  Synthetic Sequence
cgggctagtc

SEQ ID NO: 4195 - DNA, 10 bp, Artificial Sequence
  Synthetic Sequence
agtctcactt

SEQ ID NO: 4196 - DNA, 10 bp, Artificial Sequence
  Synthetic Sequence
ttcgctacgg

SEQ ID NO: 4197 - DNA, 10 bp, Artificial Sequence
  Synthetic Sequence
gcaggacctg

SEQ ID NO: 4198 - DNA, 10 bp, Artificial Sequence
  Synthetic Sequence
ttcattggat

SEQ ID NO: 4199 - DNA, 10 bp, Artificial Sequence
  Synthetic Sequence
taatttatcg

SEQ ID NO: 4200 - DNA, 10 bp, Artificial Sequence
  Synthetic Sequence
agtcaaagcc

SEQ ID NO: 4201 - DNA, 10 bp, Artificial Sequence
  Synthetic Sequence
atataagcgt

SEQ ID NO: 4202 - DNA, 10 bp, Artificial Sequence
  Synthetic Sequence
gcttgtataa

SEQ ID NO: 4203 - DNA, 10 bp, Artificial Sequence
  Synthetic Sequence
aaggctaact

SEQ ID NO: 4204 - DNA, 10 bp, Artificial Sequence
  Synthetic Sequence
acatgtacct

SEQ ID NO: 4205 - DNA, 10 bp, Artificial Sequence
  Synthetic Sequence
agcttgaaac

SEQ ID NO: 4206 - DNA, 10 bp, Artificial Sequence
  Synthetic Sequence
ccttggacta

SEQ ID NO: 4207 - DNA, 10 bp, Artificial Sequence
  Synthetic Sequence
accttcgtgt

SEQ ID NO: 4208 - DNA, 10 bp, Artificial Sequence
  Synthetic Sequence
acttccgggt

SEQ ID NO: 4209 - DNA, 10 bp, Artificial Sequence
  Synthetic Sequence
tgtagtgtct

SEQ ID NO: 4210 - DNA, 10 bp, Artificial Sequence
  Synthetic Sequence
cgttccctgt

SEQ ID NO: 4211 - DNA, 10 bp, Artificial Sequence
  Synthetic Sequence
gcccaaaccc

SEQ ID NO: 4212 - DNA, 10 bp, Artificial Sequence
  Synthetic Sequence
tgggatgtaa

SEQ ID NO: 4213 - DNA, 10 bp, Artificial Sequence
  Synthetic Sequence
tcgtctccaa

SEQ ID NO: 4214 - DNA, 10 bp, Artificial Sequence
  Synthetic Sequence
tcacaggcat

SEQ ID NO: 4215 - DNA, 10 bp, Artificial Sequence
  Synthetic Sequence
ctattcgagg

SEQ ID NO: 4216 - DNA, 10 bp, Artificial Sequence
  Synthetic Sequence
gctctcacgg

SEQ ID NO: 4217 - DNA, 10 bp, Artificial Sequence
  Synthetic Sequence
acgtttctct

SEQ ID NO: 4218 - DNA, 10 bp, Artificial Sequence
  Synthetic Sequence
cgctgatgag

SEQ ID NO: 4219 - DNA, 10 bp, Artificial Sequence
  Synthetic Sequence
ccttaggtgg

SEQ ID NO: 4220 - DNA, 10 bp, Artificial Sequence
  Synthetic Sequence
ggatcctatt

SEQ ID NO: 4221 - DNA, 10 bp, Artificial Sequence
  Synthetic Sequence
cacagtttgt

SEQ ID NO: 4222 - DNA, 10 bp, Artificial Sequence
  Synthetic Sequence
atccgtgggc

SEQ ID NO: 4223 - DNA, 10 bp, Artificial Sequence
  Synthetic Sequence
tctagcttaa

SEQ ID NO: 4224 - DNA, 10 bp, Artificial Sequence
  Synthetic Sequence
gccgcttgat

SEQ ID NO: 4225 - DNA, 10 bp, Artificial Sequence
  Synthetic Sequence
cgaatttgct

SEQ ID NO: 4226 - DNA, 10 bp, Artificial Sequence
  Synthetic Sequence
actcagccta

SEQ ID NO: 4227 - DNA, 10 bp, Artificial Sequence
  Synthetic Sequence
tggttggcgc

SEQ ID NO: 4228 - DNA, 10 bp, Artificial Sequence
  Synthetic Sequence
gaagtgggat

SEQ ID NO: 4229 - DNA, 10 bp, Artificial Sequence
  Synthetic Sequence
ggaatcttcc

SEQ ID NO: 4230 - DNA, 10 bp, Artificial Sequence
  Synthetic Sequence
tcctgatagc

SEQ ID NO: 4231 - DNA, 10 bp, Artificial Sequence
  Synthetic Sequence
atccgtatgg

SEQ ID NO: 4232 - DNA, 10 bp, Artificial Sequence
  Synthetic Sequence
ggcagctcga

SEQ ID NO: 4233 - DNA, 10 bp, Artificial Sequence
  Synthetic Sequence
caagccttca

SEQ ID NO: 4234 - DNA, 10 bp, Artificial Sequence
  Synthetic Sequence
cataacggct

SEQ ID NO: 4235 - DNA, 10 bp, Artificial Sequence
  Synthetic Sequence
agacatgacg

SEQ ID NO: 4236 - DNA, 10 bp, Artificial Sequence
  Synthetic Sequence
taccctactc

SEQ ID NO: 4237 - DNA, 10 bp, Artificial Sequence
  Synthetic Sequence
tcggagagat

SEQ ID NO: 4238 - DNA, 10 bp, Artificial Sequence
  Synthetic Sequence
gttaggaagc

SEQ ID NO: 4239 - DNA, 10 bp, Artificial Sequence
  Synthetic Sequence
tcttctaatc

SEQ ID NO: 4240 - DNA, 10 bp, Artificial Sequence
  Synthetic Sequence
cgatccttag

SEQ ID NO: 4241 - DNA, 10 bp, Artificial Sequence
  Synthetic Sequence
tgaagggtcc

SEQ ID NO: 4242 - DNA, 10 bp, Artificial Sequence
  Synthetic Sequence
gcaggcgaac

SEQ ID NO: 4243 - DNA, 10 bp, Artificial Sequence
  Synthetic Sequence
agagaaacgg

SEQ ID NO: 4244 - DNA, 10 bp, Artificial Sequence
  Synthetic Sequence
gtatctaggc

SEQ ID NO: 4245 - DNA, 10 bp, Artificial Sequence
  Synthetic Sequence
ggtaccggtg

SEQ ID NO: 4246 - DNA, 10 bp, Artificial Sequence
  Synthetic Sequence
tccgcatcat

SEQ ID NO: 4247 - DNA, 10 bp, Artificial Sequence
  Synthetic Sequence
ccagttgacc

SEQ ID NO: 4248 - DNA, 10 bp, Artificial Sequence
  Synthetic Sequence
tgccgttaat

SEQ ID NO: 4249 - DNA, 10 bp, Artificial Sequence
  Synthetic Sequence
ctccctccat

SEQ ID NO: 4250 - DNA, 10 bp, Artificial Sequence
  Synthetic Sequence
gaaattggca

SEQ ID NO: 4251 - DNA, 10 bp, Artificial Sequence
  Synthetic Sequence
gtcttcgctc

SEQ ID NO: 4252 - DNA, 10 bp, Artificial Sequence
  Synthetic Sequence
gcgattcttt

SEQ ID NO: 4253 - DNA, 10 bp, Artificial Sequence
  Synthetic Sequence
aacctagctt

SEQ ID NO: 4254 - DNA, 10 bp, Artificial Sequence
  Synthetic Sequence
actgaaacac

SEQ ID NO: 4255 - DNA, 10 bp, Artificial Sequence
  Synthetic Sequence
caacacccga

SEQ ID NO: 4256 - DNA, 10 bp, Artificial Sequence
  Synthetic Sequence
ttgactcatc

SEQ ID NO: 4257 - DNA, 10 bp, Artificial Sequence
  Synthetic Sequence
agatgtagtc

SEQ ID NO: 4258 - DNA, 10 bp, Artificial Sequence
  Synthetic Sequence
acctgctcgc

SEQ ID NO: 4259 - DNA, 10 bp, Artificial Sequence
  Synthetic Sequence
agaagtggat

SEQ ID NO: 4260 - DNA, 10 bp, Artificial Sequence
  Synthetic Sequence
cagacgtatt

SEQ ID NO: 4261 - DNA, 10 bp, Artificial Sequence
  Synthetic Sequence
gccttaaata

SEQ ID NO: 4262 - DNA, 10 bp, Artificial Sequence
  Synthetic Sequence
cgacgcgcaa

SEQ ID NO: 4263 - DNA, 10 bp, Artificial Sequence
  Synthetic Sequence
caagaggcga

SEQ ID NO: 4264 - DNA, 10 bp, Artificial Sequence
  Synthetic Sequence
gcagcacgta

SEQ ID NO: 4265 - DNA, 10 bp, Artificial Sequence
  Synthetic Sequence
ctcggtttca

SEQ ID NO: 4266 - DNA, 10 bp, Artificial Sequence
  Synthetic Sequence
gagaagaacc

SEQ ID NO: 4267 - DNA, 10 bp, Artificial Sequence
  Synthetic Sequence
cagcgtaaga

SEQ ID NO: 4268 - DNA, 10 bp, Artificial Sequence
  Synthetic Sequence
tggaacagcg

SEQ ID NO: 4269 - DNA, 10 bp, Artificial Sequence
  Synthetic Sequence
tccggtcagg

SEQ ID NO: 4270 - DNA, 10 bp, Artificial Sequence
  Synthetic Sequence
gttgatacgt

SEQ ID NO: 4271 - DNA, 10 bp, Artificial Sequence
  Synthetic Sequence
gatctagaaa

SEQ ID NO: 4272 - DNA, 10 bp, Artificial Sequence
  Synthetic Sequence
agaactagac

SEQ ID NO: 4273 - DNA, 10 bp, Artificial Sequence
  Synthetic Sequence
tgacagagct

SEQ ID NO: 4274 - DNA, 10 bp, Artificial Sequence
  Synthetic Sequence
acggcacgga

SEQ ID NO: 4275 - DNA, 10 bp, Artificial Sequence
  Synthetic Sequence
agaccgatac

SEQ ID NO: 4276 - DNA, 10 bp, Artificial Sequence
  Synthetic Sequence
tgttacggtg

SEQ ID NO: 4277 - DNA, 10 bp, Artificial Sequence
  Synthetic Sequence
gtcgcatgta

SEQ ID NO: 4278 - DNA, 10 bp, Artificial Sequence
  Synthetic Sequence
gagttgcgca

SEQ ID NO: 4279 - DNA, 10 bp, Artificial Sequence
  Synthetic Sequence
cttaaagcgt

SEQ ID NO: 4280 - DNA, 10 bp, Artificial Sequence
  Synthetic Sequence
tgcttcacca

SEQ ID NO: 4281 - DNA, 10 bp, Artificial Sequence
  Synthetic Sequence
acccattctg

SEQ ID NO: 4282 - DNA, 10 bp, Artificial Sequence
  Synthetic Sequence
actaatccaa

SEQ ID NO: 4283 - DNA, 10 bp, Artificial Sequence
  Synthetic Sequence
atttaggtca

SEQ ID NO: 4284 - DNA, 10 bp, Artificial Sequence
  Synthetic Sequence
aacattaacc

SEQ ID NO: 4285 - DNA, 10 bp, Artificial Sequence
  Synthetic Sequence
gcggtaagag

SEQ ID NO: 4286 - DNA, 10 bp, Artificial Sequence
  Synthetic Sequence
tccatgactg

SEQ ID NO: 4287 - DNA, 10 bp, Artificial Sequence
  Synthetic Sequence
acgtcaattt

SEQ ID NO: 4288 - DNA, 10 bp, Artificial Sequence
  Synthetic Sequence
gcgccatgac

SEQ ID NO: 4289 - DNA, 10 bp, Artificial Sequence
  Synthetic Sequence
gcacgcgatg

SEQ ID NO: 4290 - DNA, 10 bp, Artificial Sequence
  Synthetic Sequence
tccgggtcca

SEQ ID NO: 4291 - DNA, 10 bp, Artificial Sequence
  Synthetic Sequence
gcgacaacgc

SEQ ID NO: 4292 - DNA, 10 bp, Artificial Sequence
  Synthetic Sequence
atcgacttcc

SEQ ID NO: 4293 - DNA, 10 bp, Artificial Sequence
  Synthetic Sequence
ggtccaagca

SEQ ID NO: 4294 - DNA, 10 bp, Artificial Sequence
  Synthetic Sequence
cgtcgtccct

SEQ ID NO: 4295 - DNA, 10 bp, Artificial Sequence
  Synthetic Sequence
ccgagaggtg

SEQ ID NO: 4296 - DNA, 10 bp, Artificial Sequence
  Synthetic Sequence
aaagtcaaca

SEQ ID NO: 4297 - DNA, 10 bp, Artificial Sequence
  Synthetic Sequence
tggatcgttg

SEQ ID NO: 4298 - DNA, 10 bp, Artificial Sequence
  Synthetic Sequence
aatctcttgg

SEQ ID NO: 4299 - DNA, 10 bp, Artificial Sequence
  Synthetic Sequence
tacgacccac

SEQ ID NO: 4300 - DNA, 10 bp, Artificial Sequence
  Synthetic Sequence
gccatgacac

SEQ ID NO: 4301 - DNA, 10 bp, Artificial Sequence
  Synthetic Sequence
cgcggtgttg

SEQ ID NO: 4302 - DNA, 10 bp, Artificial Sequence
  Synthetic Sequence
cggtgctcga

SEQ ID NO: 4303 - DNA, 10 bp, Artificial Sequence
  Synthetic Sequence
cctgtaataa

SEQ ID NO: 4304 - DNA, 10 bp, Artificial Sequence
  Synthetic Sequence
tctactttag

SEQ ID NO: 4305 - DNA, 10 bp, Artificial Sequence
  Synthetic Sequence
ctgtctacag

SEQ ID NO: 4306 - DNA, 10 bp, Artificial Sequence
  Synthetic Sequence
gtgcagctat

SEQ ID NO: 4307 - DNA, 10 bp, Artificial Sequence
  Synthetic Sequence
gccgattaca

SEQ ID NO: 4308 - DNA, 10 bp, Artificial Sequence
  Synthetic Sequence
agttcagaat

SEQ ID NO: 4309 - DNA, 10 bp, Artificial Sequence
  Synthetic Sequence
ccattgagag

SEQ ID NO: 4310 - DNA, 10 bp, Artificial Sequence
  Synthetic Sequence
catgcctggc

SEQ ID NO: 4311 - DNA, 10 bp, Artificial Sequence
  Synthetic Sequence
tcaccttata

SEQ ID NO: 4312 - DNA, 10 bp, Artificial Sequence
  Synthetic Sequence
ggctccaact

SEQ ID NO: 4313 - DNA, 10 bp, Artificial Sequence
  Synthetic Sequence
atctccgata

SEQ ID NO: 4314 - DNA, 10 bp, Artificial Sequence
  Synthetic Sequence
aatagacctt

SEQ ID NO: 4315 - DNA, 10 bp, Artificial Sequence
  Synthetic Sequence
acctgcaggg

SEQ ID NO: 4316 - DNA, 10 bp, Artificial Sequence
  Synthetic Sequence
taggcaggca

SEQ ID NO: 4317 - DNA, 10 bp, Artificial Sequence
  Synthetic Sequence
gtccctgcgt

SEQ ID NO: 4318 - DNA, 10 bp, Artificial Sequence
  Synthetic Sequence
gtatcattaa

SEQ ID NO: 4319 - DNA, 10 bp, Artificial Sequence
  Synthetic Sequence
taccaagtag

SEQ ID NO: 4320 - DNA, 10 bp, Artificial Sequence
  Synthetic Sequence
gctattgtat

SEQ ID NO: 4321 - DNA, 10 bp, Artificial Sequence
  Synthetic Sequence
tcttgcggaa

SEQ ID NO: 4322 - DNA, 10 bp, Artificial Sequence
  Synthetic Sequence
catacttagg

SEQ ID NO: 4323 - DNA, 10 bp, Artificial Sequence
  Synthetic Sequence
catctccatc

SEQ ID NO: 4324 - DNA, 10 bp, Artificial Sequence
  Synthetic Sequence
accgttgcac

SEQ ID NO: 4325 - DNA, 10 bp, Artificial Sequence
  Synthetic Sequence
gtcacataac

SEQ ID NO: 4326 - DNA, 10 bp, Artificial Sequence
  Synthetic Sequence
tatgctatct

SEQ ID NO: 4327 - DNA, 10 bp, Artificial Sequence
  Synthetic Sequence
aaggtagtca

SEQ ID NO: 4328 - DNA, 10 bp, Artificial Sequence
  Synthetic Sequence
ccacaaacgt

SEQ ID NO: 4329 - DNA, 10 bp, Artificial Sequence
  Synthetic Sequence
cctggagtcg

SEQ ID NO: 4330 - DNA, 10 bp, Artificial Sequence
  Synthetic Sequence
aactagtact

SEQ ID NO: 4331 - DNA, 10 bp, Artificial Sequence
  Synthetic Sequence
cgacgagtac

SEQ ID NO: 4332 - DNA, 10 bp, Artificial Sequence
  Synthetic Sequence
tccaaatcgt

SEQ ID NO: 4333 - DNA, 10 bp, Artificial Sequence
  Synthetic Sequence
gtacccggat

SEQ ID NO: 4334 - DNA, 10 bp, Artificial Sequence
  Synthetic Sequence
ctcagcgcca

SEQ ID NO: 4335 - DNA, 10 bp, Artificial Sequence
  Synthetic Sequence
ttgtctgaag

SEQ ID NO: 4336 - DNA, 10 bp, Artificial Sequence
  Synthetic Sequence
ctcgtcggtt

SEQ ID NO: 4337 - DNA, 10 bp, Artificial Sequence
  Synthetic Sequence
gcatgggtga

SEQ ID NO: 4338 - DNA, 10 bp, Artificial Sequence
  Synthetic Sequence
tacatcaccc

SEQ ID NO: 4339 - DNA, 10 bp, Artificial Sequence
  Synthetic Sequence
agacgtacgg

SEQ ID NO: 4340 - DNA, 10 bp, Artificial Sequence
  Synthetic Sequence
tggcgtcaga

SEQ ID NO: 4341 - DNA, 10 bp, Artificial Sequence
  Synthetic Sequence
tgagccaagg

SEQ ID NO: 4342 - DNA, 10 bp, Artificial Sequence
  Synthetic Sequence
ccgctccatt

SEQ ID NO: 4343 - DNA, 10 bp, Artificial Sequence
  Synthetic Sequence
tcgaagctac

SEQ ID NO: 4344 - DNA, 10 bp, Artificial Sequence
  Synthetic Sequence
caacagtaag

SEQ ID NO: 4345 - DNA, 10 bp, Artificial Sequence
  Synthetic Sequence
ctagataatg

SEQ ID NO: 4346 - DNA, 10 bp, Artificial Sequence
  Synthetic Sequence
tgagtaatat

SEQ ID NO: 4347 - DNA, 10 bp, Artificial Sequence
  Synthetic Sequence
ataccggata

SEQ ID NO: 4348 - DNA, 10 bp, Artificial Sequence
  Synthetic Sequence
gagtccgtgt

SEQ ID NO: 4349 - DNA, 10 bp, Artificial Sequence
  Synthetic Sequence
cggctttgca

SEQ ID NO: 4350 - DNA, 10 bp, Artificial Sequence
  Synthetic Sequence
gtagtcaccg

SEQ ID NO: 4351 - DNA, 10 bp, Artificial Sequence
  Synthetic Sequence
ctaattcgtc

SEQ ID NO: 4352 - DNA, 10 bp, Artificial Sequence
  Synthetic Sequence
agtcggcatt

SEQ ID NO: 4353 - DNA, 10 bp, Artificial Sequence
  Synthetic Sequence
taataaagag

SEQ ID NO: 4354 - DNA, 10 bp, Artificial Sequence
  Synthetic Sequence
gttcccaggg

SEQ ID NO: 4355 - DNA, 10 bp, Artificial Sequence
  Synthetic Sequence
ccatatctcc

SEQ ID NO: 4356 - DNA, 10 bp, Artificial Sequence
  Synthetic Sequence
aaatcaaatt

SEQ ID NO: 4357 - DNA, 10 bp, Artificial Sequence
  Synthetic Sequence
cttccaactc

SEQ ID NO: 4358 - DNA, 10 bp, Artificial Sequence
  Synthetic Sequence
aagaatttac

SEQ ID NO: 4359 - DNA, 10 bp, Artificial Sequence
  Synthetic Sequence
ttccatatgt

SEQ ID NO: 4360 - DNA, 10 bp, Artificial Sequence
  Synthetic Sequence
attgcggagg

SEQ ID NO: 4361 - DNA, 10 bp, Artificial Sequence
  Synthetic Sequence
cctactttgt

SEQ ID NO: 4362 - DNA, 10 bp, Artificial Sequence
  Synthetic Sequence
gacaactagt

SEQ ID NO: 4363 - DNA, 10 bp, Artificial Sequence
  Synthetic Sequence
tcgcggatca

SEQ ID NO: 4364 - DNA, 10 bp, Artificial Sequence
  Synthetic Sequence
tcagggttga

SEQ ID NO: 4365 - DNA, 10 bp, Artificial Sequence
  Synthetic Sequence
aggtagaggc

SEQ ID NO: 4366 - DNA, 10 bp, Artificial Sequence
  Synthetic Sequence
ctcgatagcc

SEQ ID NO: 4367 - DNA, 10 bp, Artificial Sequence
  Synthetic Sequence
tatcctaaga

SEQ ID NO: 4368 - DNA, 10 bp, Artificial Sequence
  Synthetic Sequence
gatccactat

SEQ ID NO: 4369 - DNA, 10 bp, Artificial Sequence
  Synthetic Sequence
tcctcgcgtc

SEQ ID NO: 4370 - DNA, 10 bp, Artificial Sequence
  Synthetic Sequence
ctcggtgagt

SEQ ID NO: 4371 - DNA, 10 bp, Artificial Sequence
  Synthetic Sequence
cgcaggttgc

SEQ ID NO: 4372 - DNA, 10 bp, Artificial Sequence
  Synthetic Sequence
cagcgacatg

SEQ ID NO: 4373 - DNA, 10 bp, Artificial Sequence
  Synthetic Sequence
gactcactca

SEQ ID NO: 4374 - DNA, 10 bp, Artificial Sequence
  Synthetic Sequence
tttgctaagc

SEQ ID NO: 4375 - DNA, 10 bp, Artificial Sequence
  Synthetic Sequence
taggttctga

SEQ ID NO: 4376 - DNA, 10 bp, Artificial Sequence
  Synthetic Sequence
ggtagttcct

SEQ ID NO: 4377 - DNA, 10 bp, Artificial Sequence
  Synthetic Sequence
tagcatcgga

SEQ ID NO: 4378 - DNA, 10 bp, Artificial Sequence
  Synthetic Sequence
tatttgtgcg

SEQ ID NO: 4379 - DNA, 10 bp, Artificial Sequence
  Synthetic Sequence
tgtaccacca

SEQ ID NO: 4380 - DNA, 10 bp, Artificial Sequence
  Synthetic Sequence
tagtgaccgg

SEQ ID NO: 4381 - DNA, 10 bp, Artificial Sequence
  Synthetic Sequence
aagcgaatac

SEQ ID NO: 4382 - DNA, 10 bp, Artificial Sequence
  Synthetic Sequence
aggataggcc

SEQ ID NO: 4383 - DNA, 10 bp, Artificial Sequence
  Synthetic Sequence
gtctctacac

SEQ ID NO: 4384 - DNA, 10 bp, Artificial Sequence
  Synthetic Sequence
agcataccca

SEQ ID NO: 4385 - DNA, 10 bp, Artificial Sequence
  Synthetic Sequence
caaacgagcc

SEQ ID NO: 4386 - DNA, 10 bp, Artificial Sequence
  Synthetic Sequence
taagaggact

SEQ ID NO: 4387 - DNA, 10 bp, Artificial Sequence
  Synthetic Sequence
tgcgacaatt

SEQ ID NO: 4388 - DNA, 10 bp, Artificial Sequence
  Synthetic Sequence
gatagtcgtg

SEQ ID NO: 4389 - DNA, 10 bp, Artificial Sequence
  Synthetic Sequence
ctctggtcag

SEQ ID NO: 4390 - DNA, 10 bp, Artificial Sequence
  Synthetic Sequence
cgatagcgct

SEQ ID NO: 4391 - DNA, 10 bp, Artificial Sequence
  Synthetic Sequence
gctccaatgc

SEQ ID NO: 4392 - DNA, 10 bp, Artificial Sequence
  Synthetic Sequence
ctgctcgtcc

SEQ ID NO: 4393 - DNA, 10 bp, Artificial Sequence
  Synthetic Sequence
acagggcagg

SEQ ID NO: 4394 - DNA, 10 bp, Artificial Sequence
  Synthetic Sequence
gttccggtct

SEQ ID NO: 4395 - DNA, 10 bp, Artificial Sequence
  Synthetic Sequence
ttcgagtcac

SEQ ID NO: 4396 - DNA, 10 bp, Artificial Sequence
  Synthetic Sequence
cgaactatgt

SEQ ID NO: 4397 - DNA, 10 bp, Artificial Sequence
  Synthetic Sequence
tcctgttatt

SEQ ID NO: 4398 - DNA, 10 bp, Artificial Sequence
  Synthetic Sequence
ggtttactgt

SEQ ID NO: 4399 - DNA, 10 bp, Artificial Sequence
  Synthetic Sequence
gactaagaca

SEQ ID NO: 4400 - DNA, 10 bp, Artificial Sequence
  Synthetic Sequence
gaacgcgtgg

SEQ ID NO: 4401 - DNA, 10 bp, Artificial Sequence
  Synthetic Sequence
cacccagcct

SEQ ID NO: 4402 - DNA, 10 bp, Artificial Sequence
  Synthetic Sequence
agcaaggtat

SEQ ID NO: 4403 - DNA, 10 bp, Artificial Sequence
  Synthetic Sequence
tcatttgtgt

SEQ ID NO: 4404 - DNA, 10 bp, Artificial Sequence
  Synthetic Sequence
ctcaagcttc

SEQ ID NO: 4405 - DNA, 10 bp, Artificial Sequence
  Synthetic Sequence
gtatgaacag

SEQ ID NO: 4406 - DNA, 10 bp, Artificial Sequence
  Synthetic Sequence
acgctgcttg

SEQ ID NO: 4407 - DNA, 10 bp, Artificial Sequence
  Synthetic Sequence
ctatggcaca

SEQ ID NO: 4408 - DNA, 10 bp, Artificial Sequence
  Synthetic Sequence
cgacatactc

SEQ ID NO: 4409 - DNA, 10 bp, Artificial Sequence
  Synthetic Sequence
tgtcggacgg

SEQ ID NO: 4410 - DNA, 10 bp, Artificial Sequence
  Synthetic Sequence
ggtccagatg

SEQ ID NO: 4411 - DNA, 10 bp, Artificial Sequence
  Synthetic Sequence
accctcttgc

SEQ ID NO: 4412 - DNA, 10 bp, Artificial Sequence
  Synthetic Sequence
tggcactgag

SEQ ID NO: 4413 - DNA, 10 bp, Artificial Sequence
  Synthetic Sequence
ggttgcatgg

SEQ ID NO: 4414 - DNA, 10 bp, Artificial Sequence
  Synthetic Sequence
ttatcatgcc

SEQ ID NO: 4415 - DNA, 10 bp, Artificial Sequence
  Synthetic Sequence
cccacttcgg

SEQ ID NO: 4416 - DNA, 10 bp, Artificial Sequence
  Synthetic Sequence
gaaagcgcca

SEQ ID NO: 4417 - DNA, 10 bp, Artificial Sequence
  Synthetic Sequence
tctatatcca

SEQ ID NO: 4418 - DNA, 10 bp, Artificial Sequence
  Synthetic Sequence
gatttacgat

SEQ ID NO: 4419 - DNA, 10 bp, Artificial Sequence
  Synthetic Sequence
ggccctgact

SEQ ID NO: 4420 - DNA, 10 bp, Artificial Sequence
  Synthetic Sequence
ggaaccaaga

SEQ ID NO: 4421 - DNA, 10 bp, Artificial Sequence
  Synthetic Sequence
atttagacat

SEQ ID NO: 4422 - DNA, 10 bp, Artificial Sequence
  Synthetic Sequence
tggatcgcgt

SEQ ID NO: 4423 - DNA, 10 bp, Artificial Sequence
  Synthetic Sequence
aacgaccggg

SEQ ID NO: 4424 - DNA, 10 bp, Artificial Sequence
  Synthetic Sequence
agtgaaatct

SEQ ID NO: 4425 - DNA, 10 bp, Artificial Sequence
  Synthetic Sequence
tgtgtctcga

SEQ ID NO: 4426 - DNA, 10 bp, Artificial Sequence
  Synthetic Sequence
ttaagatggg

SEQ ID NO: 4427 - DNA, 10 bp, Artificial Sequence
  Synthetic Sequence
ctcaagatga

SEQ ID NO: 4428 - DNA, 10 bp, Artificial Sequence
  Synthetic Sequence
atctcgttag

SEQ ID NO: 4429 - DNA, 10 bp, Artificial Sequence
  Synthetic Sequence
gaactggcgc

SEQ ID NO: 4430 - DNA, 10 bp, Artificial Sequence
  Synthetic Sequence
agaagtttcc

SEQ ID NO: 4431 - DNA, 10 bp, Artificial Sequence
  Synthetic Sequence
tatactaacc

SEQ ID NO: 4432 - DNA, 10 bp, Artificial Sequence
  Synthetic Sequence
tattccgaac

SEQ ID NO: 4433 - DNA, 10 bp, Artificial Sequence
  Synthetic Sequence
gcgggcttgt

SEQ ID NO: 4434 - DNA, 10 bp, Artificial Sequence
  Synthetic Sequence
cctagcctgc

SEQ ID NO: 4435 - DNA, 10 bp, Artificial Sequence
  Synthetic Sequence
ccgtctgggt

SEQ ID NO: 4436 - DNA, 10 bp, Artificial Sequence
  Synthetic Sequence
tagaaccctt

SEQ ID NO: 4437 - DNA, 10 bp, Artificial Sequence
  Synthetic Sequence
gggccaattc

SEQ ID NO: 4438 - DNA, 10 bp, Artificial Sequence
  Synthetic Sequence
gacgaagcat

SEQ ID NO: 4439 - DNA, 10 bp, Artificial Sequence
  Synthetic Sequence
gcattagtag

SEQ ID NO: 4440 - DNA, 10 bp, Artificial Sequence
  Synthetic Sequence
actgggtcag

SEQ ID NO: 4441 - DNA, 10 bp, Artificial Sequence
  Synthetic Sequence
tctctatctg

SEQ ID NO: 4442 - DNA, 10 bp, Artificial Sequence
  Synthetic Sequence
gccttgtgtg

SEQ ID NO: 4443 - DNA, 10 bp, Artificial Sequence
  Synthetic Sequence
ctgtgagctc

SEQ ID NO: 4444 - DNA, 10 bp, Artificial Sequence
  Synthetic Sequence
ataatcatgt

SEQ ID NO: 4445 - DNA, 10 bp, Artificial Sequence
  Synthetic Sequence
cgcacttggc

SEQ ID NO: 4446 - DNA, 10 bp, Artificial Sequence
  Synthetic Sequence
ccactggcga

SEQ ID NO: 4447 - DNA, 10 bp, Artificial Sequence
  Synthetic Sequence
caacacgagc

SEQ ID NO: 4448 - DNA, 10 bp, Artificial Sequence
  Synthetic Sequence
ctgcaacaac

SEQ ID NO: 4449 - DNA, 10 bp, Artificial Sequence
  Synthetic Sequence
tacacgtaca

SEQ ID NO: 4450 - DNA, 10 bp, Artificial Sequence
  Synthetic Sequence
aaagtaagta

SEQ ID NO: 4451 - DNA, 10 bp, Artificial Sequence
  Synthetic Sequence
atcgcgttgt

SEQ ID NO: 4452 - DNA, 10 bp, Artificial Sequence
  Synthetic Sequence
tcaaactagc

SEQ ID NO: 4453 - DNA, 10 bp, Artificial Sequence
  Synthetic Sequence
cctttatcag

SEQ ID NO: 4454 - DNA, 10 bp, Artificial Sequence
  Synthetic Sequence
agagattgtc

SEQ ID NO: 4455 - DNA, 10 bp, Artificial Sequence
  Synthetic Sequence
ataggtcaca

SEQ ID NO: 4456 - DNA, 10 bp, Artificial Sequence
  Synthetic Sequence
tgtgtagtcc

SEQ ID NO: 4457 - DNA, 10 bp, Artificial Sequence
  Synthetic Sequence
atgctcatat

SEQ ID NO: 4458 - DNA, 10 bp, Artificial Sequence
  Synthetic Sequence
cacactttaa

SEQ ID NO: 4459 - DNA, 10 bp, Artificial Sequence
  Synthetic Sequence
ctcccatgac

SEQ ID NO: 4460 - DNA, 10 bp, Artificial Sequence
  Synthetic Sequence
tggagctact

SEQ ID NO: 4461 - DNA, 10 bp, Artificial Sequence
  Synthetic Sequence
tagaggactg

SEQ ID NO: 4462 - DNA, 10 bp, Artificial Sequence
  Synthetic Sequence
acctaaagtt

SEQ ID NO: 4463 - DNA, 10 bp, Artificial Sequence
  Synthetic Sequence
ggtcttgccc

SEQ ID NO: 4464 - DNA, 10 bp, Artificial Sequence
  Synthetic Sequence
tttgggttct

SEQ ID NO: 4465 - DNA, 10 bp, Artificial Sequence
  Synthetic Sequence
taccgtatct

SEQ ID NO: 4466 - DNA, 10 bp, Artificial Sequence
  Synthetic Sequence
cggaacgctc

SEQ ID NO: 4467 - DNA, 10 bp, Artificial Sequence
  Synthetic Sequence
tacaaacgca

SEQ ID NO: 4468 - DNA, 10 bp, Artificial Sequence
  Synthetic Sequence
accggaaggc

SEQ ID NO: 4469 - DNA, 10 bp, Artificial Sequence
  Synthetic Sequence
ccgatagtcc

SEQ ID NO: 4470 - DNA, 10 bp, Artificial Sequence
  Synthetic Sequence
tcggttacgc

SEQ ID NO: 4471 - DNA, 10 bp, Artificial Sequence
  Synthetic Sequence
ggatttggtc

SEQ ID NO: 4472 - DNA, 10 bp, Artificial Sequence
  Synthetic Sequence
gagattatcg

SEQ ID NO: 4473 - DNA, 10 bp, Artificial Sequence
  Synthetic Sequence
ttggaacatg

SEQ ID NO: 4474 - DNA, 10 bp, Artificial Sequence
  Synthetic Sequence
acgataataa

SEQ ID NO: 4475 - DNA, 10 bp, Artificial Sequence
  Synthetic Sequence
cgcgaactca

SEQ ID NO: 4476 - DNA, 10 bp, Artificial Sequence
  Synthetic Sequence
ccgaaacaag

SEQ ID NO: 4477 - DNA, 10 bp, Artificial Sequence
  Synthetic Sequence
taaacggccg

SEQ ID NO: 4478 - DNA, 10 bp, Artificial Sequence
  Synthetic Sequence
cgggtgaact

SEQ ID NO: 4479 - DNA, 10 bp, Artificial Sequence
  Synthetic Sequence
acattacatc

SEQ ID NO: 4480 - DNA, 10 bp, Artificial Sequence
  Synthetic Sequence
gtgctttgga

SEQ ID NO: 4481 - DNA, 10 bp, Artificial Sequence
  Synthetic Sequence
gcgtggatcg

SEQ ID NO: 4482 - DNA, 10 bp, Artificial Sequence
  Synthetic Sequence
gcgtgggaag

SEQ ID NO: 4483 - DNA, 10 bp, Artificial Sequence
  Synthetic Sequence
gtctcgcggt

SEQ ID NO: 4484 - DNA, 10 bp, Artificial Sequence
  Synthetic Sequence
gaggtgaggg

SEQ ID NO: 4485 - DNA, 10 bp, Artificial Sequence
  Synthetic Sequence
gacagtaaca

SEQ ID NO: 4486 - DNA, 10 bp, Artificial Sequence
  Synthetic Sequence
atgtgtcttg

SEQ ID NO: 4487 - DNA, 10 bp, Artificial Sequence
  Synthetic Sequence
agtaaatcag

SEQ ID NO: 4488 - DNA, 10 bp, Artificial Sequence
  Synthetic Sequence
caatagttta

SEQ ID NO: 4489 - DNA, 10 bp, Artificial Sequence
  Synthetic Sequence
cacctaaggc

SEQ ID NO: 4490 - DNA, 10 bp, Artificial Sequence
  Synthetic Sequence
ttcgaagacc

SEQ ID NO: 4491 - DNA, 10 bp, Artificial Sequence
  Synthetic Sequence
ttaatgcaat

SEQ ID NO: 4492 - DNA, 10 bp, Artificial Sequence
  Synthetic Sequence
catctctgct

SEQ ID NO: 4493 - DNA, 10 bp, Artificial Sequence
  Synthetic Sequence
ttaacgttcc

SEQ ID NO: 4494 - DNA, 10 bp, Artificial Sequence
  Synthetic Sequence
tctgacgcat

SEQ ID NO: 4495 - DNA, 10 bp, Artificial Sequence
  Synthetic Sequence
cttgcttact

SEQ ID NO: 4496 - DNA, 10 bp, Artificial Sequence
  Synthetic Sequence
aatcaccgaa

SEQ ID NO: 4497 - DNA, 10 bp, Artificial Sequence
  Synthetic Sequence
ggatagctcg

SEQ ID NO: 4498 - DNA, 10 bp, Artificial Sequence
  Synthetic Sequence
ccgttatgga

SEQ ID NO: 4499 - DNA, 10 bp, Artificial Sequence
  Synthetic Sequence
atagcatgaa

SEQ ID NO: 4500 - DNA, 10 bp, Artificial Sequence
  Synthetic Sequence
taacgaaccg

SEQ ID NO: 4501 - DNA, 10 bp, Artificial Sequence
  Synthetic Sequence
ttaagacccg

SEQ ID NO: 4502 - DNA, 10 bp, Artificial Sequence
  Synthetic Sequence
tagaatccag

SEQ ID NO: 4503 - DNA, 10 bp, Artificial Sequence
  Synthetic Sequence
tgctcaaaca

SEQ ID NO: 4504 - DNA, 10 bp, Artificial Sequence
  Synthetic Sequence
agacagctcc

SEQ ID NO: 4505 - DNA, 10 bp, Artificial Sequence
  Synthetic Sequence
aggcacggga

SEQ ID NO: 4506 - DNA, 10 bp, Artificial Sequence
  Synthetic Sequence
aagtgcatta

SEQ ID NO: 4507 - DNA, 10 bp, Artificial Sequence
  Synthetic Sequence
gtggaggttc

SEQ ID NO: 4508 - DNA, 10 bp, Artificial Sequence
  Synthetic Sequence
gcataattgg

SEQ ID NO: 4509 - DNA, 10 bp, Artificial Sequence
  Synthetic Sequence
actcacaagc

SEQ ID NO: 4510 - DNA, 10 bp, Artificial Sequence
  Synthetic Sequence
tgcctggaca

SEQ ID NO: 4511 - DNA, 10 bp, Artificial Sequence
  Synthetic Sequence
gcaggtgtcg

SEQ ID NO: 4512 - DNA, 10 bp, Artificial Sequence
  Synthetic Sequence
gcgttctcta

SEQ ID NO: 4513 - DNA, 10 bp, Artificial Sequence
  Synthetic Sequence
aataagaagc

SEQ ID NO: 4514 - DNA, 10 bp, Artificial Sequence
  Synthetic Sequence
aaattaccct

SEQ ID NO: 4515 - DNA, 10 bp, Artificial Sequence
  Synthetic Sequence
ctcttctaag

SEQ ID NO: 4516 - DNA, 10 bp, Artificial Sequence
  Synthetic Sequence
aagcagacat

SEQ ID NO: 4517 - DNA, 10 bp, Artificial Sequence
  Synthetic Sequence
cgtttgatgg

SEQ ID NO: 4518 - DNA, 10 bp, Artificial Sequence
  Synthetic Sequence
tttagattat

SEQ ID NO: 4519 - DNA, 10 bp, Artificial Sequence
  Synthetic Sequence
tttccgggtt

SEQ ID NO: 4520 - DNA, 10 bp, Artificial Sequence
  Synthetic Sequence
gctactctgg

SEQ ID NO: 4521 - DNA, 10 bp, Artificial Sequence
  Synthetic Sequence
atttaattag

SEQ ID NO: 4522 - DNA, 10 bp, Artificial Sequence
  Synthetic Sequence
ctatcgatgt

SEQ ID NO: 4523 - DNA, 10 bp, Artificial Sequence
  Synthetic Sequence
catccaacga

SEQ ID NO: 4524 - DNA, 10 bp, Artificial Sequence
  Synthetic Sequence
aaattattta

SEQ ID NO: 4525 - DNA, 10 bp, Artificial Sequence
  Synthetic Sequence
gacttgggcc

SEQ ID NO: 4526 - DNA, 10 bp, Artificial Sequence
  Synthetic Sequence
ttaccgccgg

SEQ ID NO: 4527 - DNA, 10 bp, Artificial Sequence
  Synthetic Sequence
ctatatttaa

SEQ ID NO: 4528 - DNA, 10 bp, Artificial Sequence
  Synthetic Sequence
atggcggtcg

SEQ ID NO: 4529 - DNA, 10 bp, Artificial Sequence
  Synthetic Sequence
aaagctagtt

SEQ ID NO: 4530 - DNA, 10 bp, Artificial Sequence
  Synthetic Sequence
ctaataggag

SEQ ID NO: 4531 - DNA, 10 bp, Artificial Sequence
  Synthetic Sequence
gtgcgcaagg

SEQ ID NO: 4532 - DNA, 10 bp, Artificial Sequence
  Synthetic Sequence
taatccttgc

SEQ ID NO: 4533 - DNA, 10 bp, Artificial Sequence
  Synthetic Sequence
agcccttcaa

SEQ ID NO: 4534 - DNA, 10 bp, Artificial Sequence
  Synthetic Sequence
ggtgagcgta

SEQ ID NO: 4535 - DNA, 10 bp, Artificial Sequence
  Synthetic Sequence
taaatgggct

SEQ ID NO: 4536 - DNA, 10 bp, Artificial Sequence
  Synthetic Sequence
acttcactat

SEQ ID NO: 4537 - DNA, 10 bp, Artificial Sequence
  Synthetic Sequence
tctcgccttg

SEQ ID NO: 4538 - DNA, 10 bp, Artificial Sequence
  Synthetic Sequence
tacgatgaat

SEQ ID NO: 4539 - DNA, 10 bp, Artificial Sequence
  Synthetic Sequence
gaccctaagt

SEQ ID NO: 4540 - DNA, 10 bp, Artificial Sequence
  Synthetic Sequence
caactttccc

SEQ ID NO: 4541 - DNA, 10 bp, Artificial Sequence
  Synthetic Sequence
tgtaaacccg

SEQ ID NO: 4542 - DNA, 10 bp, Artificial Sequence
  Synthetic Sequence
gtgggcaact

SEQ ID NO: 4543 - DNA, 10 bp, Artificial Sequence
  Synthetic Sequence
tttcgtccgc

SEQ ID NO: 4544 - DNA, 10 bp, Artificial Sequence
  Synthetic Sequence
acgctggtga

SEQ ID NO: 4545 - DNA, 10 bp, Artificial Sequence
  Synthetic Sequence
acaaattcca

SEQ ID NO: 4546 - DNA, 10 bp, Artificial Sequence
  Synthetic Sequence
atagcgcgcg

SEQ ID NO: 4547 - DNA, 10 bp, Artificial Sequence
  Synthetic Sequence
aagtatcccg

SEQ ID NO: 4548 - DNA, 10 bp, Artificial Sequence
  Synthetic Sequence
cggtagtggg

SEQ ID NO: 4549 - DNA, 10 bp, Artificial Sequence
  Synthetic Sequence
tgaacgccag

SEQ ID NO: 4550 - DNA, 10 bp, Artificial Sequence
  Synthetic Sequence
aatgatgagc

SEQ ID NO: 4551 - DNA, 10 bp, Artificial Sequence
  Synthetic Sequence
gaatcgaaac

SEQ ID NO: 4552 - DNA, 10 bp, Artificial Sequence
  Synthetic Sequence
atgcccaacg

SEQ ID NO: 4553 - DNA, 10 bp, Artificial Sequence
  Synthetic Sequence
agcgcggtaa

SEQ ID NO: 4554 - DNA, 10 bp, Artificial Sequence
  Synthetic Sequence
ctgagcaaca

SEQ ID NO: 4555 - DNA, 10 bp, Artificial Sequence
  Synthetic Sequence
tgtataatcg

SEQ ID NO: 4556 - DNA, 10 bp, Artificial Sequence
  Synthetic Sequence
ccaaccatca

SEQ ID NO: 4557 - DNA, 10 bp, Artificial Sequence
  Synthetic Sequence
atctcgcttt

SEQ ID NO: 4558 - DNA, 10 bp, Artificial Sequence
  Synthetic Sequence
cttacgtccc

SEQ ID NO: 4559 - DNA, 10 bp, Artificial Sequence
  Synthetic Sequence
gtcgaaacac

SEQ ID NO: 4560 - DNA, 10 bp, Artificial Sequence
  Synthetic Sequence
cttacgattc

SEQ ID NO: 4561 - DNA, 10 bp, Artificial Sequence
  Synthetic Sequence
agtggtagca

SEQ ID NO: 4562 - DNA, 10 bp, Artificial Sequence
  Synthetic Sequence
acctcaaccg

SEQ ID NO: 4563 - DNA, 10 bp, Artificial Sequence
  Synthetic Sequence
tcatcccggt

SEQ ID NO: 4564 - DNA, 10 bp, Artificial Sequence
  Synthetic Sequence
catacgtcaa

SEQ ID NO: 4565 - DNA, 10 bp, Artificial Sequence
  Synthetic Sequence
gcgcgaatta

SEQ ID NO: 4566 - DNA, 10 bp, Artificial Sequence
  Synthetic Sequence
taacctgagc

SEQ ID NO: 4567 - DNA, 10 bp, Artificial Sequence
  Synthetic Sequence
cgatctcaat

SEQ ID NO: 4568 - DNA, 10 bp, Artificial Sequence
  Synthetic Sequence
ttatcgacac

SEQ ID NO: 4569 - DNA, 10 bp, Artificial Sequence
  Synthetic Sequence
gatgatgact

SEQ ID NO: 4570 - DNA, 10 bp, Artificial Sequence
  Synthetic Sequence
tgagctaatc

SEQ ID NO: 4571 - DNA, 10 bp, Artificial Sequence
  Synthetic Sequence
accatgatag

SEQ ID NO: 4572 - DNA, 10 bp, Artificial Sequence
  Synthetic Sequence
ttgaagtagt

SEQ ID NO: 4573 - DNA, 10 bp, Artificial Sequence
  Synthetic Sequence
gattcaatgt

SEQ ID NO: 4574 - DNA, 10 bp, Artificial Sequence
  Synthetic Sequence
atggtattat

SEQ ID NO: 4575 - DNA, 10 bp, Artificial Sequence
  Synthetic Sequence
atcacctcga

SEQ ID NO: 4576 - DNA, 10 bp, Artificial Sequence
  Synthetic Sequence
gttcaggtaa

SEQ ID NO: 4577 - DNA, 10 bp, Artificial Sequence
  Synthetic Sequence
aagccgaatc

SEQ ID NO: 4578 - DNA, 10 bp, Artificial Sequence
  Synthetic Sequence
tgtatggaat

SEQ ID NO: 4579 - DNA, 10 bp, Artificial Sequence
  Synthetic Sequence
catgcgaccc

SEQ ID NO: 4580 - DNA, 10 bp, Artificial Sequence
  Synthetic Sequence
gctactgcga

SEQ ID NO: 4581 - DNA, 10 bp, Artificial Sequence
  Synthetic Sequence
ttgtccgacc

SEQ ID NO: 4582 - DNA, 10 bp, Artificial Sequence
  Synthetic Sequence
gtattagagc

SEQ ID NO: 4583 - DNA, 10 bp, Artificial Sequence
  Synthetic Sequence
gccagtgtgc

SEQ ID NO: 4584 - DNA, 10 bp, Artificial Sequence
  Synthetic Sequence
ggaaattatc

SEQ ID NO: 4585 - DNA, 10 bp, Artificial Sequence
  Synthetic Sequence
taagggtgta

SEQ ID NO: 4586 - DNA, 10 bp, Artificial Sequence
  Synthetic Sequence
tttgccactt

SEQ ID NO: 4587 - DNA, 10 bp, Artificial Sequence
  Synthetic Sequence
tctatacata

SEQ ID NO: 4588 - DNA, 10 bp, Artificial Sequence
  Synthetic Sequence
ttgagagggt

SEQ ID NO: 4589 - DNA, 10 bp, Artificial Sequence
  Synthetic Sequence
catccgcgca

SEQ ID NO: 4590 - DNA, 10 bp, Artificial Sequence
  Synthetic Sequence
attgccaccg

SEQ ID NO: 4591 - DNA, 10 bp, Artificial Sequence
  Synthetic Sequence
ggcattcctc

SEQ ID NO: 4592 - DNA, 10 bp, Artificial Sequence
  Synthetic Sequence
cataattatt

SEQ ID NO: 4593 - DNA, 10 bp, Artificial Sequence
  Synthetic Sequence
aacctacagc

SEQ ID NO: 4594 - DNA, 10 bp, Artificial Sequence
  Synthetic Sequence
acactgtcaa

SEQ ID NO: 4595 - DNA, 10 bp, Artificial Sequence
  Synthetic Sequence
acagggcgat

SEQ ID NO: 4596 - DNA, 10 bp, Artificial Sequence
  Synthetic Sequence
gggagtactt

SEQ ID NO: 4597 - DNA, 10 bp, Artificial Sequence
  Synthetic Sequence
acgcgtatct

SEQ ID NO: 4598 - DNA, 10 bp, Artificial Sequence
  Synthetic Sequence
cttctgggaa

SEQ ID NO: 4599 - DNA, 10 bp, Artificial Sequence
  Synthetic Sequence
gtggcgggaa

SEQ ID NO: 4600 - DNA, 10 bp, Artificial Sequence
  Synthetic Sequence
acatattata

SEQ ID NO: 4601 - DNA, 10 bp, Artificial Sequence
  Synthetic Sequence
cgctctagcc

SEQ ID NO: 4602 - DNA, 10 bp, Artificial Sequence
  Synthetic Sequence
agccattgta

SEQ ID NO: 4603 - DNA, 10 bp, Artificial Sequence
  Synthetic Sequence
gctaatacct

SEQ ID NO: 4604 - DNA, 10 bp, Artificial Sequence
  Synthetic Sequence
caggataggc

SEQ ID NO: 4605 - DNA, 10 bp, Artificial Sequence
  Synthetic Sequence
ttggtagaca

SEQ ID NO: 4606 - DNA, 10 bp, Artificial Sequence
  Synthetic Sequence
cgcgacgtgt

SEQ ID NO: 4607 - DNA, 10 bp, Artificial Sequence
  Synthetic Sequence
gcttcacatc

SEQ ID NO: 4608 - DNA, 10 bp, Artificial Sequence
  Synthetic Sequence
cactacgtat

SEQ ID NO: 4609 - DNA, 10 bp, Artificial Sequence
  Synthetic Sequence
ggttcttgcc

SEQ ID NO: 4610 - DNA, 10 bp, Artificial Sequence
  Synthetic Sequence
ctccgccgtt

SEQ ID NO: 4611 - DNA, 10 bp, Artificial Sequence
  Synthetic Sequence
ccgtgtcttt

SEQ ID NO: 4612 - DNA, 10 bp, Artificial Sequence
  Synthetic Sequence
gtatggcccg

SEQ ID NO: 4613 - DNA, 10 bp, Artificial Sequence
  Synthetic Sequence
cacattccaa

SEQ ID NO: 4614 - DNA, 10 bp, Artificial Sequence
  Synthetic Sequence
acgatagcta

SEQ ID NO: 4615 - DNA, 10 bp, Artificial Sequence
  Synthetic Sequence
gccaaccgaa

SEQ ID NO: 4616 - DNA, 10 bp, Artificial Sequence
  Synthetic Sequence
gactatgcac

SEQ ID NO: 4617 - DNA, 10 bp, Artificial Sequence
  Synthetic Sequence
gttctagcgc

SEQ ID NO: 4618 - DNA, 10 bp, Artificial Sequence
  Synthetic Sequence
ttatatctac

SEQ ID NO: 4619 - DNA, 10 bp, Artificial Sequence
  Synthetic Sequence
cagagatgct

SEQ ID NO: 4620 - DNA, 10 bp, Artificial Sequence
  Synthetic Sequence
accggtgttc

SEQ ID NO: 4621 - DNA, 10 bp, Artificial Sequence
  Synthetic Sequence
ataacacttt

SEQ ID NO: 4622 - DNA, 10 bp, Artificial Sequence
  Synthetic Sequence
gggaacacgt

SEQ ID NO: 4623 - DNA, 10 bp, Artificial Sequence
  Synthetic Sequence
aaaggcgtca

SEQ ID NO: 4624 - DNA, 10 bp, Artificial Sequence
  Synthetic Sequence
gggcgttata

SEQ ID NO: 4625 - DNA, 10 bp, Artificial Sequence
  Synthetic Sequence
gtcgacttgt

SEQ ID NO: 4626 - DNA, 10 bp, Artificial Sequence
  Synthetic Sequence
ggaataaact

SEQ ID NO: 4627 - DNA, 10 bp, Artificial Sequence
  Synthetic Sequence
ttgaggtgac

SEQ ID NO: 4628 - DNA, 10 bp, Artificial Sequence
  Synthetic Sequence
atgttcttct

SEQ ID NO: 4629 - DNA, 10 bp, Artificial Sequence
  Synthetic Sequence
atcttactgc

SEQ ID NO: 4630 - DNA, 10 bp, Artificial Sequence
  Synthetic Sequence
ccgatgcttc

SEQ ID NO: 4631 - DNA, 10 bp, Artificial Sequence
  Synthetic Sequence
tacacttatt

SEQ ID NO: 4632 - DNA, 10 bp, Artificial Sequence
  Synthetic Sequence
aaattcttcc

SEQ ID NO: 4633 - DNA, 10 bp, Artificial Sequence
  Synthetic Sequence
gctacgtcat

SEQ ID NO: 4634 - DNA, 10 bp, Artificial Sequence
  Synthetic Sequence
gagttcaaca

SEQ ID NO: 4635 - DNA, 10 bp, Artificial Sequence
  Synthetic Sequence
ctatgccttc

SEQ ID NO: 4636 - DNA, 10 bp, Artificial Sequence
  Synthetic Sequence
aaacatgaac

SEQ ID NO: 4637 - DNA, 10 bp, Artificial Sequence
  Synthetic Sequence
ccagatcgtc

SEQ ID NO: 4638 - DNA, 10 bp, Artificial Sequence
  Synthetic Sequence
cagacacgca

SEQ ID NO: 4639 - DNA, 10 bp, Artificial Sequence
  Synthetic Sequence
gctcggttgg

SEQ ID NO: 4640 - DNA, 10 bp, Artificial Sequence
  Synthetic Sequence
gaattacatt

SEQ ID NO: 4641 - DNA, 10 bp, Artificial Sequence
  Synthetic Sequence
tagcttgacg

SEQ ID NO: 4642 - DNA, 10 bp, Artificial Sequence
  Synthetic Sequence
aggaagtgac

SEQ ID NO: 4643 - DNA, 10 bp, Artificial Sequence
  Synthetic Sequence
ccctgggcaa

SEQ ID NO: 4644 - DNA, 10 bp, Artificial Sequence
  Synthetic Sequence
tcggcagtcg

SEQ ID NO: 4645 - DNA, 10 bp, Artificial Sequence
  Synthetic Sequence
ggctaccgca

SEQ ID NO: 4646 - DNA, 10 bp, Artificial Sequence
  Synthetic Sequence
gttgatggac

SEQ ID NO: 4647 - DNA, 10 bp, Artificial Sequence
  Synthetic Sequence
accacgaacc

SEQ ID NO: 4648 - DNA, 10 bp, Artificial Sequence
  Synthetic Sequence
ccacacgtcg

SEQ ID NO: 4649 - DNA, 10 bp, Artificial Sequence
  Synthetic Sequence
aactttgatc

SEQ ID NO: 4650 - DNA, 10 bp, Artificial Sequence
  Synthetic Sequence
agcgggcaat

SEQ ID NO: 4651 - DNA, 10 bp, Artificial Sequence
  Synthetic Sequence
gtaccgagaa

SEQ ID NO: 4652 - DNA, 10 bp, Artificial Sequence
  Synthetic Sequence
gcggcacaac

SEQ ID NO: 4653 - DNA, 10 bp, Artificial Sequence
  Synthetic Sequence
atagggacag

SEQ ID NO: 4654 - DNA, 10 bp, Artificial Sequence
  Synthetic Sequence
cactaaacga

SEQ ID NO: 4655 - DNA, 10 bp, Artificial Sequence
  Synthetic Sequence
atggcctcaa

SEQ ID NO: 4656 - DNA, 10 bp, Artificial Sequence
  Synthetic Sequence
gcttatggta

SEQ ID NO: 4657 - DNA, 10 bp, Artificial Sequence
  Synthetic Sequence
ttcgacctgc

SEQ ID NO: 4658 - DNA, 10 bp, Artificial Sequence
  Synthetic Sequence
cggtttagaa

SEQ ID NO: 4659 - DNA, 10 bp, Artificial Sequence
  Synthetic Sequence
tgtcggtcac

SEQ ID NO: 4660 - DNA, 10 bp, Artificial Sequence
  Synthetic Sequence
aacggctcac

SEQ ID NO: 4661 - DNA, 10 bp, Artificial Sequence
  Synthetic Sequence
agcaccatgt

SEQ ID NO: 4662 - DNA, 10 bp, Artificial Sequence
  Synthetic Sequence
aaacgcacgc

SEQ ID NO: 4663 - DNA, 10 bp, Artificial Sequence
  Synthetic Sequence
cccgcgttat

SEQ ID NO: 4664 - DNA, 10 bp, Artificial Sequence
  Synthetic Sequence
gaggcctgct

SEQ ID NO: 4665 - DNA, 10 bp, Artificial Sequence
  Synthetic Sequence
catgctacaa

SEQ ID NO: 4666 - DNA, 10 bp, Artificial Sequence
  Synthetic Sequence
gtcctgagcg

SEQ ID NO: 4667 - DNA, 10 bp, Artificial Sequence
  Synthetic Sequence
cctttgatca

SEQ ID NO: 4668 - DNA, 10 bp, Artificial Sequence
  Synthetic Sequence
agggcttgtg

SEQ ID NO: 4669 - DNA, 10 bp, Artificial Sequence
  Synthetic Sequence
gagccctcaa

SEQ ID NO: 4670 - DNA, 10 bp, Artificial Sequence
  Synthetic Sequence
cggtgcggat

SEQ ID NO: 4671 - DNA, 10 bp, Artificial Sequence
  Synthetic Sequence
atcttcatac

SEQ ID NO: 4672 - DNA, 10 bp, Artificial Sequence
  Synthetic Sequence
ccgcctcgtt

SEQ ID NO: 4673 - DNA, 10 bp, Artificial Sequence
  Synthetic Sequence
caccgtgatg

SEQ ID NO: 4674 - DNA, 10 bp, Artificial Sequence
  Synthetic Sequence
actagttgga

SEQ ID NO: 4675 - DNA, 10 bp, Artificial Sequence
  Synthetic Sequence
actatggtcg

SEQ ID NO: 4676 - DNA, 10 bp, Artificial Sequence
  Synthetic Sequence
tctctcgcac

SEQ ID NO: 4677 - DNA, 10 bp, Artificial Sequence
  Synthetic Sequence
tttaccctaa

SEQ ID NO: 4678 - DNA, 10 bp, Artificial Sequence
  Synthetic Sequence
cccttggacc

SEQ ID NO: 4679 - DNA, 10 bp, Artificial Sequence
  Synthetic Sequence
actcgaataa

SEQ ID NO: 4680 - DNA, 10 bp, Artificial Sequence
  Synthetic Sequence
tcgtcttagt

SEQ ID NO: 4681 - DNA, 10 bp, Artificial Sequence
  Synthetic Sequence
cggatactgc

SEQ ID NO: 4682 - DNA, 10 bp, Artificial Sequence
  Synthetic Sequence
ctaggccagc

SEQ ID NO: 4683 - DNA, 10 bp, Artificial Sequence
  Synthetic Sequence
gtagtacgag

SEQ ID NO: 4684 - DNA, 10 bp, Artificial Sequence
  Synthetic Sequence
cggttcgcag

SEQ ID NO: 4685 - DNA, 10 bp, Artificial Sequence
  Synthetic Sequence
atttctcgct

SEQ ID NO: 4686 - DNA, 10 bp, Artificial Sequence
  Synthetic Sequence
gctcggcact

SEQ ID NO: 4687 - DNA, 10 bp, Artificial Sequence
  Synthetic Sequence
gtatacgggc

SEQ ID NO: 4688 - DNA, 10 bp, Artificial Sequence
  Synthetic Sequence
gcatccaagc

SEQ ID NO: 4689 - DNA, 10 bp, Artificial Sequence
  Synthetic Sequence
gggcgcgttt

SEQ ID NO: 4690 - DNA, 10 bp, Artificial Sequence
  Synthetic Sequence
taggctgcgt

SEQ ID NO: 4691 - DNA, 10 bp, Artificial Sequence
  Synthetic Sequence
aagcagctta

SEQ ID NO: 4692 - DNA, 10 bp, Artificial Sequence
  Synthetic Sequence
aacagtgact

SEQ ID NO: 4693 - DNA, 10 bp, Artificial Sequence
  Synthetic Sequence
gggcacagct

SEQ ID NO: 4694 - DNA, 10 bp, Artificial Sequence
  Synthetic Sequence
cacaaccatt

SEQ ID NO: 4695 - DNA, 10 bp, Artificial Sequence
  Synthetic Sequence
tcatttcgtc

SEQ ID NO: 4696 - DNA, 10 bp, Artificial Sequence
  Synthetic Sequence
gtctcccatt

SEQ ID NO: 4697 - DNA, 10 bp, Artificial Sequence
  Synthetic Sequence
gcaggatgag

SEQ ID NO: 4698 - DNA, 10 bp, Artificial Sequence
  Synthetic Sequence
cttcaacata

SEQ ID NO: 4699 - DNA, 10 bp, Artificial Sequence
  Synthetic Sequence
tcggttgtgg

SEQ ID NO: 4700 - DNA, 10 bp, Artificial Sequence
  Synthetic Sequence
aagtccgtac

SEQ ID NO: 4701 - DNA, 10 bp, Artificial Sequence
  Synthetic Sequence
tgaggccctg

SEQ ID NO: 4702 - DNA, 10 bp, Artificial Sequence
  Synthetic Sequence
tgtatcgtga

SEQ ID NO: 4703 - DNA, 10 bp, Artificial Sequence
  Synthetic Sequence
tcgacatggg

SEQ ID NO: 4704 - DNA, 10 bp, Artificial Sequence
  Synthetic Sequence
cgtgctggga

SEQ ID NO: 4705 - DNA, 10 bp, Artificial Sequence
  Synthetic Sequence
ctcacagaat

SEQ ID NO: 4706 - DNA, 10 bp, Artificial Sequence
  Synthetic Sequence
gtttcggtga

SEQ ID NO: 4707 - DNA, 10 bp, Artificial Sequence
  Synthetic Sequence
ccaccctaac

SEQ ID NO: 4708 - DNA, 10 bp, Artificial Sequence
  Synthetic Sequence
gcgatctagt

SEQ ID NO: 4709 - DNA, 10 bp, Artificial Sequence
  Synthetic Sequence
caatgtctcg

SEQ ID NO: 4710 - DNA, 10 bp, Artificial Sequence
  Synthetic Sequence
gagactgact

SEQ ID NO: 4711 - DNA, 10 bp, Artificial Sequence
  Synthetic Sequence
gaggtggcac

SEQ ID NO: 4712 - DNA, 10 bp, Artificial Sequence
  Synthetic Sequence
atgatagcac

SEQ ID NO: 4713 - DNA, 10 bp, Artificial Sequence
  Synthetic Sequence
taatgatagg

SEQ ID NO: 4714 - DNA, 10 bp, Artificial Sequence
  Synthetic Sequence
cagggctgtc

SEQ ID NO: 4715 - DNA, 10 bp, Artificial Sequence
  Synthetic Sequence
gtaaagagag

SEQ ID NO: 4716 - DNA, 10 bp, Artificial Sequence
  Synthetic Sequence
caggtgtgta

SEQ ID NO: 4717 - DNA, 10 bp, Artificial Sequence
  Synthetic Sequence
taggtaaata

SEQ ID NO: 4718 - DNA, 10 bp, Artificial Sequence
  Synthetic Sequence
ttctgatgac

SEQ ID NO: 4719 - DNA, 10 bp, Artificial Sequence
  Synthetic Sequence
gaaacgagat

SEQ ID NO: 4720 - DNA, 10 bp, Artificial Sequence
  Synthetic Sequence
tttcgatctc

SEQ ID NO: 4721 - DNA, 10 bp, Artificial Sequence
  Synthetic Sequence
atatgatgat

SEQ ID NO: 4722 - DNA, 10 bp, Artificial Sequence
  Synthetic Sequence
gcggcggaat

SEQ ID NO: 4723 - DNA, 10 bp, Artificial Sequence
  Synthetic Sequence
tgagctgtcc

SEQ ID NO: 4724 - DNA, 10 bp, Artificial Sequence
  Synthetic Sequence
ggttcatgag

SEQ ID NO: 4725 - DNA, 10 bp, Artificial Sequence
  Synthetic Sequence
agcgggacgt

SEQ ID NO: 4726 - DNA, 10 bp, Artificial Sequence
  Synthetic Sequence
gacatgagta

SEQ ID NO: 4727 - DNA, 10 bp, Artificial Sequence
  Synthetic Sequence
gagaatgcta

SEQ ID NO: 4728 - DNA, 10 bp, Artificial Sequence
  Synthetic Sequence
ttgcgtgagt

SEQ ID NO: 4729 - DNA, 10 bp, Artificial Sequence
  Synthetic Sequence
gtcagatttc

SEQ ID NO: 4730 - DNA, 10 bp, Artificial Sequence
  Synthetic Sequence
aggactctca

SEQ ID NO: 4731 - DNA, 10 bp, Artificial Sequence
  Synthetic Sequence
cattggtcga

SEQ ID NO: 4732 - DNA, 10 bp, Artificial Sequence
  Synthetic Sequence
agggacgatc

SEQ ID NO: 4733 - DNA, 10 bp, Artificial Sequence
  Synthetic Sequence
tagtttcgcc

SEQ ID NO: 4734 - DNA, 10 bp, Artificial Sequence
  Synthetic Sequence
gaagttacat

SEQ ID NO: 4735 - DNA, 10 bp, Artificial Sequence
  Synthetic Sequence
cgctgtaatt

SEQ ID NO: 4736 - DNA, 10 bp, Artificial Sequence
  Synthetic Sequence
ctcgatctta

SEQ ID NO: 4737 - DNA, 10 bp, Artificial Sequence
  Synthetic Sequence
ctgaaatccc

SEQ ID NO: 4738 - DNA, 10 bp, Artificial Sequence
  Synthetic Sequence
gatttaccgc

SEQ ID NO: 4739 - DNA, 10 bp, Artificial Sequence
  Synthetic Sequence
cggtaaccac

SEQ ID NO: 4740 - DNA, 10 bp, Artificial Sequence
  Synthetic Sequence
cgaaagtaaa

SEQ ID NO: 4741 - DNA, 10 bp, Artificial Sequence
  Synthetic Sequence
tcgcttggga

SEQ ID NO: 4742 - DNA, 10 bp, Artificial Sequence
  Synthetic Sequence
acgcagcggt

SEQ ID NO: 4743 - DNA, 10 bp, Artificial Sequence
  Synthetic Sequence
ccagacaaat

SEQ ID NO: 4744 - DNA, 10 bp, Artificial Sequence
  Synthetic Sequence
acactcgaca

SEQ ID NO: 4745 - DNA, 10 bp, Artificial Sequence
  Synthetic Sequence
cagttactcc

SEQ ID NO: 4746 - DNA, 10 bp, Artificial Sequence
  Synthetic Sequence
attccgtaga

SEQ ID NO: 4747 - DNA, 10 bp, Artificial Sequence
  Synthetic Sequence
tatgtaaccc

SEQ ID NO: 4748 - DNA, 10 bp, Artificial Sequence
  Synthetic Sequence
gcgaagaaag

SEQ ID NO: 4749 - DNA, 10 bp, Artificial Sequence
  Synthetic Sequence
cagctccaag

SEQ ID NO: 4750 - DNA, 10 bp, Artificial Sequence
  Synthetic Sequence
catggtgcga

SEQ ID NO: 4751 - DNA, 10 bp, Artificial Sequence
  Synthetic Sequence
atgctggcct

SEQ ID NO: 4752 - DNA, 10 bp, Artificial Sequence
  Synthetic Sequence
ttgcagaact

SEQ ID NO: 4753 - DNA, 10 bp, Artificial Sequence
  Synthetic Sequence
ggttaaaccg

SEQ ID NO: 4754 - DNA, 10 bp, Artificial Sequence
  Synthetic Sequence
ccacagatct

SEQ ID NO: 4755 - DNA, 10 bp, Artificial Sequence
  Synthetic Sequence
atggcgactc

SEQ ID NO: 4756 - DNA, 10 bp, Artificial Sequence
  Synthetic Sequence
ggattcgacc

SEQ ID NO: 4757 - DNA, 10 bp, Artificial Sequence
  Synthetic Sequence
aaattaggtc

SEQ ID NO: 4758 - DNA, 10 bp, Artificial Sequence
  Synthetic Sequence
tagttgtcga

SEQ ID NO: 4759 - DNA, 10 bp, Artificial Sequence
  Synthetic Sequence
ccaccgtagt

SEQ ID NO: 4760 - DNA, 10 bp, Artificial Sequence
  Synthetic Sequence
attgaatcgc

SEQ ID NO: 4761 - DNA, 10 bp, Artificial Sequence
  Synthetic Sequence
ctattcagtc

SEQ ID NO: 4762 - DNA, 10 bp, Artificial Sequence
  Synthetic Sequence
gtgcaaactt

SEQ ID NO: 4763 - DNA, 10 bp, Artificial Sequence
  Synthetic Sequence
tttactgtgt

SEQ ID NO: 4764 - DNA, 10 bp, Artificial Sequence
  Synthetic Sequence
ttcgccagag

SEQ ID NO: 4765 - DNA, 10 bp, Artificial Sequence
  Synthetic Sequence
aaccgttatc

SEQ ID NO: 4766 - DNA, 10 bp, Artificial Sequence
  Synthetic Sequence
cggtttccat

SEQ ID NO: 4767 - DNA, 10 bp, Artificial Sequence
  Synthetic Sequence
gttgaatgaa

SEQ ID NO: 4768 - DNA, 10 bp, Artificial Sequence
  Synthetic Sequence
gtcagggtgt

SEQ ID NO: 4769 - DNA, 10 bp, Artificial Sequence
  Synthetic Sequence
atagctgaac

SEQ ID NO: 4770 - DNA, 10 bp, Artificial Sequence
  Synthetic Sequence
gaaataaccg

SEQ ID NO: 4771 - DNA, 10 bp, Artificial Sequence
  Synthetic Sequence
gcagtgccag

SEQ ID NO: 4772 - DNA, 10 bp, Artificial Sequence
  Synthetic Sequence
agtgcacacg

SEQ ID NO: 4773 - DNA, 10 bp, Artificial Sequence
  Synthetic Sequence
ctacctgtca

SEQ ID NO: 4774 - DNA, 10 bp, Artificial Sequence
  Synthetic Sequence
aaatttctgg

SEQ ID NO: 4775 - DNA, 10 bp, Artificial Sequence
  Synthetic Sequence
ttgcacccgc

SEQ ID NO: 4776 - DNA, 10 bp, Artificial Sequence
  Synthetic Sequence
gatatgcatt

SEQ ID NO: 4777 - DNA, 10 bp, Artificial Sequence
  Synthetic Sequence
aatcgccagg

SEQ ID NO: 4778 - DNA, 10 bp, Artificial Sequence
  Synthetic Sequence
cagtagacgg

SEQ ID NO: 4779 - DNA, 10 bp, Artificial Sequence
  Synthetic Sequence
caagactatc

SEQ ID NO: 4780 - DNA, 10 bp, Artificial Sequence
  Synthetic Sequence
atatacaaac

SEQ ID NO: 4781 - DNA, 10 bp, Artificial Sequence
  Synthetic Sequence
tcctagcagg

SEQ ID NO: 4782 - DNA, 10 bp, Artificial Sequence
  Synthetic Sequence
cctctttaga

SEQ ID NO: 4783 - DNA, 10 bp, Artificial Sequence
  Synthetic Sequence
gagatggctt

SEQ ID NO: 4784 - DNA, 10 bp, Artificial Sequence
  Synthetic Sequence
atatagaatt

SEQ ID NO: 4785 - DNA, 10 bp, Artificial Sequence
  Synthetic Sequence
agttattaag

SEQ ID NO: 4786 - DNA, 10 bp, Artificial Sequence
  Synthetic Sequence
tagggcagta

SEQ ID NO: 4787 - DNA, 10 bp, Artificial Sequence
  Synthetic Sequence
gtggtgctga

SEQ ID NO: 4788 - DNA, 10 bp, Artificial Sequence
  Synthetic Sequence
cctgagtcga

SEQ ID NO: 4789 - DNA, 10 bp, Artificial Sequence
  Synthetic Sequence
tctacagaat

SEQ ID NO: 4790 - DNA, 10 bp, Artificial Sequence
  Synthetic Sequence
gcagcttatt

SEQ ID NO: 4791 - DNA, 10 bp, Artificial Sequence
  Synthetic Sequence
ccgcgaagct

SEQ ID NO: 4792 - DNA, 10 bp, Artificial Sequence
  Synthetic Sequence
cctattagag

SEQ ID NO: 4793 - DNA, 10 bp, Artificial Sequence
  Synthetic Sequence
tcctttcaga

SEQ ID NO: 4794 - DNA, 10 bp, Artificial Sequence
  Synthetic Sequence
cgatttaagc

SEQ ID NO: 4795 - DNA, 10 bp, Artificial Sequence
  Synthetic Sequence
caaccgacgg

SEQ ID NO: 4796 - DNA, 10 bp, Artificial Sequence
  Synthetic Sequence
accgacaggt

SEQ ID NO: 4797 - DNA, 10 bp, Artificial Sequence
  Synthetic Sequence
agctactcgg

SEQ ID NO: 4798 - DNA, 10 bp, Artificial Sequence
  Synthetic Sequence
tctagggatg

SEQ ID NO: 4799 - DNA, 10 bp, Artificial Sequence
  Synthetic Sequence
gcagctccct

SEQ ID NO: 4800 - DNA, 10 bp, Artificial Sequence
  Synthetic Sequence
ctgatgagtc

SEQ ID NO: 4801 - DNA, 10 bp, Artificial Sequence
  Synthetic Sequence
gatacaccag

SEQ ID NO: 4802 - DNA, 10 bp, Artificial Sequence
  Synthetic Sequence
cacccgaaca

SEQ ID NO: 4803 - DNA, 10 bp, Artificial Sequence
  Synthetic Sequence
taccggccac

SEQ ID NO: 4804 - DNA, 10 bp, Artificial Sequence
  Synthetic Sequence
gcgctgctac

SEQ ID NO: 4805 - DNA, 10 bp, Artificial Sequence
  Synthetic Sequence
gctggttgct

SEQ ID NO: 4806 - DNA, 10 bp, Artificial Sequence
  Synthetic Sequence
tgtaatacag

SEQ ID NO: 4807 - DNA, 10 bp, Artificial Sequence
  Synthetic Sequence
catccttaac

SEQ ID NO: 4808 - DNA, 10 bp, Artificial Sequence
  Synthetic Sequence
tgttcatttc

SEQ ID NO: 4809 - DNA, 10 bp, Artificial Sequence
  Synthetic Sequence
gtctcctcgc

SEQ ID NO: 4810 - DNA, 10 bp, Artificial Sequence
  Synthetic Sequence
cagtacccag

SEQ ID NO: 4811 - DNA, 10 bp, Artificial Sequence
  Synthetic Sequence
gttggcaggt

SEQ ID NO: 4812 - DNA, 10 bp, Artificial Sequence
  Synthetic Sequence
atcaatctca

SEQ ID NO: 4813 - DNA, 10 bp, Artificial Sequence
  Synthetic Sequence
cttcccgtgg

SEQ ID NO: 4814 - DNA, 10 bp, Artificial Sequence
  Synthetic Sequence
cgaatcacga

SEQ ID NO: 4815 - DNA, 10 bp, Artificial Sequence
  Synthetic Sequence
acgcaaccgg

SEQ ID NO: 4816 - DNA, 10 bp, Artificial Sequence
  Synthetic Sequence
gattgacttg

SEQ ID NO: 4817 - DNA, 10 bp, Artificial Sequence
  Synthetic Sequence
gaaggcatct

SEQ ID NO: 4818 - DNA, 10 bp, Artificial Sequence
  Synthetic Sequence
gcagaggtgc

SEQ ID NO: 4819 - DNA, 10 bp, Artificial Sequence
  Synthetic Sequence
ggcacacaaa

SEQ ID NO: 4820 - DNA, 10 bp, Artificial Sequence
  Synthetic Sequence
aattgcactc

SEQ ID NO: 4821 - DNA, 10 bp, Artificial Sequence
  Synthetic Sequence
cgcttcgtct

SEQ ID NO: 4822 - DNA, 10 bp, Artificial Sequence
  Synthetic Sequence
gtgccatagt

SEQ ID NO: 4823 - DNA, 10 bp, Artificial Sequence
  Synthetic Sequence
tcaactgttc

SEQ ID NO: 4824 - DNA, 10 bp, Artificial Sequence
  Synthetic Sequence
acacaaccct

SEQ ID NO: 4825 - DNA, 10 bp, Artificial Sequence
  Synthetic Sequence
tgcggttccc

SEQ ID NO: 4826 - DNA, 10 bp, Artificial Sequence
  Synthetic Sequence
cgccctaaga

SEQ ID NO: 4827 - DNA, 10 bp, Artificial Sequence
  Synthetic Sequence
atccctcttc

SEQ ID NO: 4828 - DNA, 10 bp, Artificial Sequence
  Synthetic Sequence
tgacgaattc

SEQ ID NO: 4829 - DNA, 10 bp, Artificial Sequence
  Synthetic Sequence
tgacctatcg

SEQ ID NO: 4830 - DNA, 10 bp, Artificial Sequence
  Synthetic Sequence
acaggtacac

SEQ ID NO: 4831 - DNA, 10 bp, Artificial Sequence
  Synthetic Sequence
atgacttggt

SEQ ID NO: 4832 - DNA, 10 bp, Artificial Sequence
  Synthetic Sequence
ttagtgtaac

SEQ ID NO: 4833 - DNA, 10 bp, Artificial Sequence
  Synthetic Sequence
taagcaagtg

SEQ ID NO: 4834 - DNA, 10 bp, Artificial Sequence
  Synthetic Sequence
tggacagccc

SEQ ID NO: 4835 - DNA, 10 bp, Artificial Sequence
  Synthetic Sequence
cgtagggacg

SEQ ID NO: 4836 - DNA, 10 bp, Artificial Sequence
  Synthetic Sequence
ataggcaggc

SEQ ID NO: 4837 - DNA, 10 bp, Artificial Sequence
  Synthetic Sequence
ctagttccat

SEQ ID NO: 4838 - DNA, 10 bp, Artificial Sequence
  Synthetic Sequence
attactctgc

SEQ ID NO: 4839 - DNA, 10 bp, Artificial Sequence
  Synthetic Sequence
cgagcttgaa

SEQ ID NO: 4840 - DNA, 10 bp, Artificial Sequence
  Synthetic Sequence
gtgggcgtac

SEQ ID NO: 4841 - DNA, 10 bp, Artificial Sequence
  Synthetic Sequence
ttacttcaag

SEQ ID NO: 4842 - DNA, 10 bp, Artificial Sequence
  Synthetic Sequence
cacgtaatat

SEQ ID NO: 4843 - DNA, 10 bp, Artificial Sequence
  Synthetic Sequence
ctcctccagg

SEQ ID NO: 4844 - DNA, 10 bp, Artificial Sequence
  Synthetic Sequence
cttccctgat

SEQ ID NO: 4845 - DNA, 10 bp, Artificial Sequence
  Synthetic Sequence
ttaatattta

SEQ ID NO: 4846 - DNA, 10 bp, Artificial Sequence
  Synthetic Sequence
aaactgtagt

SEQ ID NO: 4847 - DNA, 10 bp, Artificial Sequence
  Synthetic Sequence
cctgaattgt

SEQ ID NO: 4848 - DNA, 10 bp, Artificial Sequence
  Synthetic Sequence
tagaagtgat

SEQ ID NO: 4849 - DNA, 10 bp, Artificial Sequence
  Synthetic Sequence
ctcatcaggg

SEQ ID NO: 4850 - DNA, 10 bp, Artificial Sequence
  Synthetic Sequence
atatatgctc

SEQ ID NO: 4851 - DNA, 10 bp, Artificial Sequence
  Synthetic Sequence
gtagttatga

SEQ ID NO: 4852 - DNA, 10 bp, Artificial Sequence
  Synthetic Sequence
cagtaaggcg

SEQ ID NO: 4853 - DNA, 10 bp, Artificial Sequence
  Synthetic Sequence
aggcatatag

SEQ ID NO: 4854 - DNA, 10 bp, Artificial Sequence
  Synthetic Sequence
ggagtaggta

SEQ ID NO: 4855 - DNA, 10 bp, Artificial Sequence
  Synthetic Sequence
gctcagaaat

SEQ ID NO: 4856 - DNA, 10 bp, Artificial Sequence
  Synthetic Sequence
aacgctctcg

SEQ ID NO: 4857 - DNA, 10 bp, Artificial Sequence
  Synthetic Sequence
tttcgcttgt

SEQ ID NO: 4858 - DNA, 10 bp, Artificial Sequence
  Synthetic Sequence
accaagtgaa

SEQ ID NO: 4859 - DNA, 10 bp, Artificial Sequence
  Synthetic Sequence
ccaattgtta

SEQ ID NO: 4860 - DNA, 10 bp, Artificial Sequence
  Synthetic Sequence
gagactcccg

SEQ ID NO: 4861 - DNA, 10 bp, Artificial Sequence
  Synthetic Sequence
gacggttggt

SEQ ID NO: 4862 - DNA, 10 bp, Artificial Sequence
  Synthetic Sequence
ggcatgacgt

SEQ ID NO: 4863 - DNA, 10 bp, Artificial Sequence
  Synthetic Sequence
accgcgtaaa

SEQ ID NO: 4864 - DNA, 10 bp, Artificial Sequence
  Synthetic Sequence
gaccgcatcg

SEQ ID NO: 4865 - DNA, 10 bp, Artificial Sequence
  Synthetic Sequence
agcccgatta

SEQ ID NO: 4866 - DNA, 10 bp, Artificial Sequence
  Synthetic Sequence
aatggtctga

SEQ ID NO: 4867 - DNA, 10 bp, Artificial Sequence
  Synthetic Sequence
tcccgtccga

SEQ ID NO: 4868 - DNA, 10 bp, Artificial Sequence
  Synthetic Sequence
atcattaatt

SEQ ID NO: 4869 - DNA, 10 bp, Artificial Sequence
  Synthetic Sequence
gcggagttct

SEQ ID NO: 4870 - DNA, 10 bp, Artificial Sequence
  Synthetic Sequence
tagagctgcg

SEQ ID NO: 4871 - DNA, 10 bp, Artificial Sequence
  Synthetic Sequence
attataattt

SEQ ID NO: 4872 - DNA, 10 bp, Artificial Sequence
  Synthetic Sequence
gcaatctcat

SEQ ID NO: 4873 - DNA, 10 bp, Artificial Sequence
  Synthetic Sequence
caggtcccac

SEQ ID NO: 4874 - DNA, 10 bp, Artificial Sequence
  Synthetic Sequence
atattaagtt

SEQ ID NO: 4875 - DNA, 10 bp, Artificial Sequence
  Synthetic Sequence
caatcaccac

SEQ ID NO: 4876 - DNA, 10 bp, Artificial Sequence
  Synthetic Sequence
ccatgcgaag

SEQ ID NO: 4877 - DNA, 10 bp, Artificial Sequence
  Synthetic Sequence
tggtgagtcg

SEQ ID NO: 4878 - DNA, 10 bp, Artificial Sequence
  Synthetic Sequence
gtgcagtagc

SEQ ID NO: 4879 - DNA, 10 bp, Artificial Sequence
  Synthetic Sequence
gttggttatt

SEQ ID NO: 4880 - DNA, 10 bp, Artificial Sequence
  Synthetic Sequence
gatagatggt

SEQ ID NO: 4881 - DNA, 10 bp, Artificial Sequence
  Synthetic Sequence
gcatacccga

SEQ ID NO: 4882 - DNA, 10 bp, Artificial Sequence
  Synthetic Sequence
aagctcgact

SEQ ID NO: 4883 - DNA, 10 bp, Artificial Sequence
  Synthetic Sequence
cctatacgcg

SEQ ID NO: 4884 - DNA, 10 bp, Artificial Sequence
  Synthetic Sequence
tgctccttaa

SEQ ID NO: 4885 - DNA, 10 bp, Artificial Sequence
  Synthetic Sequence
agtatacatt

SEQ ID NO: 4886 - DNA, 10 bp, Artificial Sequence
  Synthetic Sequence
gtacgcgttc

SEQ ID NO: 4887 - DNA, 10 bp, Artificial Sequence
  Synthetic Sequence
cgtgagttaa

SEQ ID NO: 4888 - DNA, 10 bp, Artificial Sequence
  Synthetic Sequence
ggacaatgag

SEQ ID NO: 4889 - DNA, 10 bp, Artificial Sequence
  Synthetic Sequence
atatttaccg

SEQ ID NO: 4890 - DNA, 10 bp, Artificial Sequence
  Synthetic Sequence
agcacctacg

SEQ ID NO: 4891 - DNA, 10 bp, Artificial Sequence
  Synthetic Sequence
acatctcttg

SEQ ID NO: 4892 - DNA, 10 bp, Artificial Sequence
  Synthetic Sequence
caatgtgcgc

SEQ ID NO: 4893 - DNA, 10 bp, Artificial Sequence
  Synthetic Sequence
atcactgcgc

SEQ ID NO: 4894 - DNA, 10 bp, Artificial Sequence
  Synthetic Sequence
cacgtcttta

SEQ ID NO: 4895 - DNA, 10 bp, Artificial Sequence
  Synthetic Sequence
cagttcgatg

SEQ ID NO: 4896 - DNA, 10 bp, Artificial Sequence
  Synthetic Sequence
cgggctctta

SEQ ID NO: 4897 - DNA, 10 bp, Artificial Sequence
  Synthetic Sequence
gtagaaatat

SEQ ID NO: 4898 - DNA, 10 bp, Artificial Sequence
  Synthetic Sequence
gaattctacg

SEQ ID NO: 4899 - DNA, 10 bp, Artificial Sequence
  Synthetic Sequence
acgcctcctg

SEQ ID NO: 4900 - DNA, 10 bp, Artificial Sequence
  Synthetic Sequence
cttgatgggt

SEQ ID NO: 4901 - DNA, 10 bp, Artificial Sequence
  Synthetic Sequence
cagatgctaa

SEQ ID NO: 4902 - DNA, 10 bp, Artificial Sequence
  Synthetic Sequence
gacacttgct

SEQ ID NO: 4903 - DNA, 10 bp, Artificial Sequence
  Synthetic Sequence
agttccattc

SEQ ID NO: 4904 - DNA, 10 bp, Artificial Sequence
  Synthetic Sequence
ttagttgcac

SEQ ID NO: 4905 - DNA, 10 bp, Artificial Sequence
  Synthetic Sequence
cactaatgcc

SEQ ID NO: 4906 - DNA, 10 bp, Artificial Sequence
  Synthetic Sequence
gggtagcttc

SEQ ID NO: 4907 - DNA, 10 bp, Artificial Sequence
  Synthetic Sequence
ccctgtttag

SEQ ID NO: 4908 - DNA, 10 bp, Artificial Sequence
  Synthetic Sequence
actggacgcc

SEQ ID NO: 4909 - DNA, 10 bp, Artificial Sequence
  Synthetic Sequence
cacatggcca

SEQ ID NO: 4910 - DNA, 10 bp, Artificial Sequence
  Synthetic Sequence
tttgtaacgg

SEQ ID NO: 4911 - DNA, 10 bp, Artificial Sequence
  Synthetic Sequence
ttgagtgata

SEQ ID NO: 4912 - DNA, 10 bp, Artificial Sequence
  Synthetic Sequence
attgttaaga

SEQ ID NO: 4913 - DNA, 10 bp, Artificial Sequence
  Synthetic Sequence
acgctaaata

SEQ ID NO: 4914 - DNA, 10 bp, Artificial Sequence
  Synthetic Sequence
gacatgcgct

SEQ ID NO: 4915 - DNA, 10 bp, Artificial Sequence
  Synthetic Sequence
ataaccgact

SEQ ID NO: 4916 - DNA, 10 bp, Artificial Sequence
  Synthetic Sequence
ggcctaacga

SEQ ID NO: 4917 - DNA, 10 bp, Artificial Sequence
  Synthetic Sequence
gtgttatcgc

SEQ ID NO: 4918 - DNA, 10 bp, Artificial Sequence
  Synthetic Sequence
ttctgttcgc

SEQ ID NO: 4919 - DNA, 10 bp, Artificial Sequence
  Synthetic Sequence
gggacgagac

SEQ ID NO: 4920 - DNA, 10 bp, Artificial Sequence
  Synthetic Sequence
tagcttaatt

SEQ ID NO: 4921 - DNA, 10 bp, Artificial Sequence
  Synthetic Sequence
tcgacatcaa

SEQ ID NO: 4922 - DNA, 10 bp, Artificial Sequence
  Synthetic Sequence
ggcgtaacct

SEQ ID NO: 4923 - DNA, 10 bp, Artificial Sequence
  Synthetic Sequence
caagaactgt

SEQ ID NO: 4924 - DNA, 10 bp, Artificial Sequence
  Synthetic Sequence
gatggccgta

SEQ ID NO: 4925 - DNA, 10 bp, Artificial Sequence
  Synthetic Sequence
gccgatgcct

SEQ ID NO: 4926 - DNA, 10 bp, Artificial Sequence
  Synthetic Sequence
tgcaggaacg

SEQ ID NO: 4927 - DNA, 10 bp, Artificial Sequence
  Synthetic Sequence
ctacgttgcc

SEQ ID NO: 4928 - DNA, 10 bp, Artificial Sequence
  Synthetic Sequence
acgttagtgg

SEQ ID NO: 4929 - DNA, 10 bp, Artificial Sequence
  Synthetic Sequence
tgcgtatccg

SEQ ID NO: 4930 - DNA, 10 bp, Artificial Sequence
  Synthetic Sequence
ttcaataggg

SEQ ID NO: 4931 - DNA, 10 bp, Artificial Sequence
  Synthetic Sequence
agccacaaag

SEQ ID NO: 4932 - DNA, 10 bp, Artificial Sequence
  Synthetic Sequence
ccagtttaat

SEQ ID NO: 4933 - DNA, 10 bp, Artificial Sequence
  Synthetic Sequence
agacaacgta

SEQ ID NO: 4934 - DNA, 10 bp, Artificial Sequence
  Synthetic Sequence
ctgcagggca

SEQ ID NO: 4935 - DNA, 10 bp, Artificial Sequence
  Synthetic Sequence
ggtcaaatgt

SEQ ID NO: 4936 - DNA, 10 bp, Artificial Sequence
  Synthetic Sequence
tgagttacag

SEQ ID NO: 4937 - DNA, 10 bp, Artificial Sequence
  Synthetic Sequence
agccatactt

SEQ ID NO: 4938 - DNA, 10 bp, Artificial Sequence
  Synthetic Sequence
ctcgcgtcct

SEQ ID NO: 4939 - DNA, 10 bp, Artificial Sequence
  Synthetic Sequence
ggttatacgc

SEQ ID NO: 4940 - DNA, 10 bp, Artificial Sequence
  Synthetic Sequence
tacgggtgag

SEQ ID NO: 4941 - DNA, 10 bp, Artificial Sequence
  Synthetic Sequence
cattactgtc

SEQ ID NO: 4942 - DNA, 10 bp, Artificial Sequence
  Synthetic Sequence
ggtagcattc

SEQ ID NO: 4943 - DNA, 10 bp, Artificial Sequence
  Synthetic Sequence
ttattgtaca

SEQ ID NO: 4944 - DNA, 10 bp, Artificial Sequence
  Synthetic Sequence
tattatcacc

SEQ ID NO: 4945 - DNA, 10 bp, Artificial Sequence
  Synthetic Sequence
tatttgccca

SEQ ID NO: 4946 - DNA, 10 bp, Artificial Sequence
  Synthetic Sequence
tgaggtgatg

SEQ ID NO: 4947 - DNA, 10 bp, Artificial Sequence
  Synthetic Sequence
ctttcacagt

SEQ ID NO: 4948 - DNA, 10 bp, Artificial Sequence
  Synthetic Sequence
aaactctcct

SEQ ID NO: 4949 - DNA, 10 bp, Artificial Sequence
  Synthetic Sequence
gtccaatgcc

SEQ ID NO: 4950 - DNA, 10 bp, Artificial Sequence
  Synthetic Sequence
ctaatgaaac

SEQ ID NO: 4951 - DNA, 10 bp, Artificial Sequence
  Synthetic Sequence
cagtaatagt

SEQ ID NO: 4952 - DNA, 10 bp, Artificial Sequence
  Synthetic Sequence
atttagcata

SEQ ID NO: 4953 - DNA, 10 bp, Artificial Sequence
  Synthetic Sequence
tggccgccta

SEQ ID NO: 4954 - DNA, 10 bp, Artificial Sequence
  Synthetic Sequence
ggcgacgaat

SEQ ID NO: 4955 - DNA, 10 bp, Artificial Sequence
  Synthetic Sequence
cagaacctgc

SEQ ID NO: 4956 - DNA, 10 bp, Artificial Sequence
  Synthetic Sequence
gcgttgtccc

SEQ ID NO: 4957 - DNA, 10 bp, Artificial Sequence
  Synthetic Sequence
tctcaacttt

SEQ ID NO: 4958 - DNA, 10 bp, Artificial Sequence
  Synthetic Sequence
tccggcaacc

SEQ ID NO: 4959 - DNA, 10 bp, Artificial Sequence
  Synthetic Sequence
cggcgtatcg

SEQ ID NO: 4960 - DNA, 10 bp, Artificial Sequence
  Synthetic Sequence
tgcatgccgg

SEQ ID NO: 4961 - DNA, 10 bp, Artificial Sequence
  Synthetic Sequence
ccagcaccat

SEQ ID NO: 4962 - DNA, 10 bp, Artificial Sequence
  Synthetic Sequence
tgcgagtacg

SEQ ID NO: 4963 - DNA, 10 bp, Artificial Sequence
  Synthetic Sequence
ggcggaggtt

SEQ ID NO: 4964 - DNA, 10 bp, Artificial Sequence
  Synthetic Sequence
tttgcggctg

SEQ ID NO: 4965 - DNA, 10 bp, Artificial Sequence
  Synthetic Sequence
gcgcagtttc

SEQ ID NO: 4966 - DNA, 10 bp, Artificial Sequence
  Synthetic Sequence
atggcagaaa

SEQ ID NO: 4967 - DNA, 10 bp, Artificial Sequence
  Synthetic Sequence
ttatgaaagt

SEQ ID NO: 4968 - DNA, 10 bp, Artificial Sequence
  Synthetic Sequence
agatgccttg

SEQ ID NO: 4969 - DNA, 10 bp, Artificial Sequence
  Synthetic Sequence
cgtgtcagat

SEQ ID NO: 4970 - DNA, 10 bp, Artificial Sequence
  Synthetic Sequence
gctccttaat

SEQ ID NO: 4971 - DNA, 10 bp, Artificial Sequence
  Synthetic Sequence
ttgggacaaa

SEQ ID NO: 4972 - DNA, 10 bp, Artificial Sequence
  Synthetic Sequence
gtgggtattt

SEQ ID NO: 4973 - DNA, 10 bp, Artificial Sequence
  Synthetic Sequence
ttggcttgac

SEQ ID NO: 4974 - DNA, 10 bp, Artificial Sequence
  Synthetic Sequence
aaagacgttt

SEQ ID NO: 4975 - DNA, 10 bp, Artificial Sequence
  Synthetic Sequence
aatacgagca

SEQ ID NO: 4976 - DNA, 10 bp, Artificial Sequence
  Synthetic Sequence
ttatcaccaa

SEQ ID NO: 4977 - DNA, 10 bp, Artificial Sequence
  Synthetic Sequence
agcgagtgag

SEQ ID NO: 4978 - DNA, 10 bp, Artificial Sequence
  Synthetic Sequence
cctttgaggt

SEQ ID NO: 4979 - DNA, 10 bp, Artificial Sequence
  Synthetic Sequence
tcaccactga

SEQ ID NO: 4980 - DNA, 10 bp, Artificial Sequence
  Synthetic Sequence
aaggaattcg

SEQ ID NO: 4981 - DNA, 10 bp, Artificial Sequence
  Synthetic Sequence
cgctcaccgt

SEQ ID NO: 4982 - DNA, 10 bp, Artificial Sequence
  Synthetic Sequence
gcctaagcgt

SEQ ID NO: 4983 - DNA, 10 bp, Artificial Sequence
  Synthetic Sequence
gtttcgtaaa

SEQ ID NO: 4984 - DNA, 10 bp, Artificial Sequence
  Synthetic Sequence
ccagttatac

SEQ ID NO: 4985 - DNA, 10 bp, Artificial Sequence
  Synthetic Sequence
tattctactt

SEQ ID NO: 4986 - DNA, 10 bp, Artificial Sequence
  Synthetic Sequence
ggccatgggt

SEQ ID NO: 4987 - DNA, 10 bp, Artificial Sequence
  Synthetic Sequence
ctgaactcaa

SEQ ID NO: 4988 - DNA, 10 bp, Artificial Sequence
  Synthetic Sequence
ctatacggag

SEQ ID NO: 4989 - DNA, 10 bp, Artificial Sequence
  Synthetic Sequence
cttggacgtg

SEQ ID NO: 4990 - DNA, 10 bp, Artificial Sequence
  Synthetic Sequence
tacctagcac

SEQ ID NO: 4991 - DNA, 10 bp, Artificial Sequence
  Synthetic Sequence
catgtcggag

SEQ ID NO: 4992 - DNA, 10 bp, Artificial Sequence
  Synthetic Sequence
tttagggcat

SEQ ID NO: 4993 - DNA, 10 bp, Artificial Sequence
  Synthetic Sequence
ggttcactaa

SEQ ID NO: 4994 - DNA, 10 bp, Artificial Sequence
  Synthetic Sequence
acatagtcgt

SEQ ID NO: 4995 - DNA, 10 bp, Artificial Sequence
  Synthetic Sequence
tcataatcct

SEQ ID NO: 4996 - DNA, 10 bp, Artificial Sequence
  Synthetic Sequence
cttgcgtatc

SEQ ID NO: 4997 - DNA, 10 bp, Artificial Sequence
  Synthetic Sequence
atatacccag

SEQ ID NO: 4998 - DNA, 10 bp, Artificial Sequence
  Synthetic Sequence
acttaggacc

SEQ ID NO: 4999 - DNA, 10 bp, Artificial Sequence
  Synthetic Sequence
agggctggaa

SEQ ID NO: 5000 - DNA, 10 bp, Artificial Sequence
  Synthetic Sequence
gccttcaagg

SEQ ID NO: 5001 - DNA, 10 bp, Artificial Sequence
  Synthetic Sequence
ggtgccaaag

SEQ ID NO: 5002 - DNA, 10 bp, Artificial Sequence
  Synthetic Sequence
ggctaaccga

SEQ ID NO: 5003 - DNA, 10 bp, Artificial Sequence
  Synthetic Sequence
atagggtatc

SEQ ID NO: 5004 - DNA, 10 bp, Artificial Sequence
  Synthetic Sequence
gttgaccgag

SEQ ID NO: 5005 - DNA, 10 bp, Artificial Sequence
  Synthetic Sequence
caaggaagac

SEQ ID NO: 5006 - DNA, 10 bp, Artificial Sequence
  Synthetic Sequence
tgactccgac

SEQ ID NO: 5007 - DNA, 10 bp, Artificial Sequence
  Synthetic Sequence
aatcattcac

SEQ ID NO: 5008 - DNA, 10 bp, Artificial Sequence
  Synthetic Sequence
ctatgggtgg

SEQ ID NO: 5009 - DNA, 10 bp, Artificial Sequence
  Synthetic Sequence
ataggacatg

SEQ ID NO: 5010 - DNA, 10 bp, Artificial Sequence
  Synthetic Sequence
cgacaggtaa

SEQ ID NO: 5011 - DNA, 10 bp, Artificial Sequence
  Synthetic Sequence
aaattcacag

SEQ ID NO: 5012 - DNA, 10 bp, Artificial Sequence
  Synthetic Sequence
aggtgcgagc

SEQ ID NO: 5013 - DNA, 10 bp, Artificial Sequence
  Synthetic Sequence
tagtccacat

SEQ ID NO: 5014 - DNA, 10 bp, Artificial Sequence
  Synthetic Sequence
aattagagtc

SEQ ID NO: 5015 - DNA, 10 bp, Artificial Sequence
  Synthetic Sequence
gaaatgactc

SEQ ID NO: 5016 - DNA, 10 bp, Artificial Sequence
  Synthetic Sequence
ggttcgcgct

SEQ ID NO: 5017 - DNA, 10 bp, Artificial Sequence
  Synthetic Sequence
agatgcacat

SEQ ID NO: 5018 - DNA, 10 bp, Artificial Sequence
  Synthetic Sequence
ttagtgtcct

SEQ ID NO: 5019 - DNA, 10 bp, Artificial Sequence
  Synthetic Sequence
gaccgcccat

SEQ ID NO: 5020 - DNA, 10 bp, Artificial Sequence
  Synthetic Sequence
acaggtgagc

SEQ ID NO: 5021 - DNA, 10 bp, Artificial Sequence
  Synthetic Sequence
cctctcgagg

SEQ ID NO: 5022 - DNA, 10 bp, Artificial Sequence
  Synthetic Sequence
aactctgaat

SEQ ID NO: 5023 - DNA, 10 bp, Artificial Sequence
  Synthetic Sequence
agttgtgact

SEQ ID NO: 5024 - DNA, 10 bp, Artificial Sequence
  Synthetic Sequence
acgtcagggc

SEQ ID NO: 5025 - DNA, 10 bp, Artificial Sequence
  Synthetic Sequence
gcaagctggc

SEQ ID NO: 5026 - DNA, 10 bp, Artificial Sequence
  Synthetic Sequence
gacccgtatc

SEQ ID NO: 5027 - DNA, 10 bp, Artificial Sequence
  Synthetic Sequence
acgccctgct

SEQ ID NO: 5028 - DNA, 10 bp, Artificial Sequence
  Synthetic Sequence
caacgagatt

SEQ ID NO: 5029 - DNA, 10 bp, Artificial Sequence
  Synthetic Sequence
cgcgcggatt

SEQ ID NO: 5030 - DNA, 10 bp, Artificial Sequence
  Synthetic Sequence
acgtgacagc

SEQ ID NO: 5031 - DNA, 10 bp, Artificial Sequence
  Synthetic Sequence
aattccctta

SEQ ID NO: 5032 - DNA, 10 bp, Artificial Sequence
  Synthetic Sequence
gttatgcgca

SEQ ID NO: 5033 - DNA, 10 bp, Artificial Sequence
  Synthetic Sequence
aggaattaat

SEQ ID NO: 5034 - DNA, 10 bp, Artificial Sequence
  Synthetic Sequence
taaccgatct

SEQ ID NO: 5035 - DNA, 10 bp, Artificial Sequence
  Synthetic Sequence
aacgtaaccg

SEQ ID NO: 5036 - DNA, 10 bp, Artificial Sequence
  Synthetic Sequence
tgcggatggg

SEQ ID NO: 5037 - DNA, 10 bp, Artificial Sequence
  Synthetic Sequence
tatacatgga

SEQ ID NO: 5038 - DNA, 10 bp, Artificial Sequence
  Synthetic Sequence
gtttccgcat

SEQ ID NO: 5039 - DNA, 10 bp, Artificial Sequence
  Synthetic Sequence
gggtctatct

SEQ ID NO: 5040 - DNA, 10 bp, Artificial Sequence
  Synthetic Sequence
tctgccgtca

SEQ ID NO: 5041 - DNA, 10 bp, Artificial Sequence
  Synthetic Sequence
ggacgtagct

SEQ ID NO: 5042 - DNA, 10 bp, Artificial Sequence
  Synthetic Sequence
aggatacaac

SEQ ID NO: 5043 - DNA, 10 bp, Artificial Sequence
  Synthetic Sequence
ggaagcgtaa

SEQ ID NO: 5044 - DNA, 10 bp, Artificial Sequence
  Synthetic Sequence
gttatggctg

SEQ ID NO: 5045 - DNA, 10 bp, Artificial Sequence
  Synthetic Sequence
gacattcgag

SEQ ID NO: 5046 - DNA, 10 bp, Artificial Sequence
  Synthetic Sequence
agccacggat

SEQ ID NO: 5047 - DNA, 10 bp, Artificial Sequence
  Synthetic Sequence
tcatcattat

SEQ ID NO: 5048 - DNA, 10 bp, Artificial Sequence
  Synthetic Sequence
tggctcttcc

SEQ ID NO: 5049 - DNA, 10 bp, Artificial Sequence
  Synthetic Sequence
aaactaaact

SEQ ID NO: 5050 - DNA, 10 bp, Artificial Sequence
  Synthetic Sequence
ttaacaactc

SEQ ID NO: 5051 - DNA, 10 bp, Artificial Sequence
  Synthetic Sequence
gttctccgcg

SEQ ID NO: 5052 - DNA, 10 bp, Artificial Sequence
  Synthetic Sequence
gactttgagt

SEQ ID NO: 5053 - DNA, 10 bp, Artificial Sequence
  Synthetic Sequence
ccgacatcct

SEQ ID NO: 5054 - DNA, 10 bp, Artificial Sequence
  Synthetic Sequence
ggacctctat

SEQ ID NO: 5055 - DNA, 10 bp, Artificial Sequence
  Synthetic Sequence
tctcggcaaa

SEQ ID NO: 5056 - DNA, 10 bp, Artificial Sequence
  Synthetic Sequence
gatgcgttat

SEQ ID NO: 5057 - DNA, 10 bp, Artificial Sequence
  Synthetic Sequence
gttcccgtta

SEQ ID NO: 5058 - DNA, 10 bp, Artificial Sequence
  Synthetic Sequence
aataaggtcc

SEQ ID NO: 5059 - DNA, 10 bp, Artificial Sequence
  Synthetic Sequence
tatgtcgacc

SEQ ID NO: 5060 - DNA, 10 bp, Artificial Sequence
  Synthetic Sequence
ctggcctgta

SEQ ID NO: 5061 - DNA, 10 bp, Artificial Sequence
  Synthetic Sequence
agtacaggct

SEQ ID NO: 5062 - DNA, 10 bp, Artificial Sequence
  Synthetic Sequence
tcgcttgtcc

SEQ ID NO: 5063 - DNA, 10 bp, Artificial Sequence
  Synthetic Sequence
cagtgtctgc

SEQ ID NO: 5064 - DNA, 10 bp, Artificial Sequence
  Synthetic Sequence
aactaattgc

SEQ ID NO: 5065 - DNA, 10 bp, Artificial Sequence
  Synthetic Sequence
ctagtaattg

SEQ ID NO: 5066 - DNA, 10 bp, Artificial Sequence
  Synthetic Sequence
gttacagacg

SEQ ID NO: 5067 - DNA, 10 bp, Artificial Sequence
  Synthetic Sequence
gaacactgca

SEQ ID NO: 5068 - DNA, 10 bp, Artificial Sequence
  Synthetic Sequence
aaggcatggt

SEQ ID NO: 5069 - DNA, 10 bp, Artificial Sequence
  Synthetic Sequence
tgtcgcatcc

SEQ ID NO: 5070 - DNA, 10 bp, Artificial Sequence
  Synthetic Sequence
aaatgccggc

SEQ ID NO: 5071 - DNA, 10 bp, Artificial Sequence
  Synthetic Sequence
ggacaagttg

SEQ ID NO: 5072 - DNA, 10 bp, Artificial Sequence
  Synthetic Sequence
atcttggccc

SEQ ID NO: 5073 - DNA, 10 bp, Artificial Sequence
  Synthetic Sequence
gatggctacc

SEQ ID NO: 5074 - DNA, 10 bp, Artificial Sequence
  Synthetic Sequence
tgacggcgtc

SEQ ID NO: 5075 - DNA, 10 bp, Artificial Sequence
  Synthetic Sequence
tcctcggctg

SEQ ID NO: 5076 - DNA, 10 bp, Artificial Sequence
  Synthetic Sequence
cgcggctaaa

SEQ ID NO: 5077 - DNA, 10 bp, Artificial Sequence
  Synthetic Sequence
agctgacgaa

SEQ ID NO: 5078 - DNA, 10 bp, Artificial Sequence
  Synthetic Sequence
gtgggatcta

SEQ ID NO: 5079 - DNA, 10 bp, Artificial Sequence
  Synthetic Sequence
tagcgggact

SEQ ID NO: 5080 - DNA, 10 bp, Artificial Sequence
  Synthetic Sequence
cgttgagtat

SEQ ID NO: 5081 - DNA, 10 bp, Artificial Sequence
  Synthetic Sequence
agtatgtcca

SEQ ID NO: 5082 - DNA, 10 bp, Artificial Sequence
  Synthetic Sequence
tgttgctgag

SEQ ID NO: 5083 - DNA, 10 bp, Artificial Sequence
  Synthetic Sequence
ggacatcgac

SEQ ID NO: 5084 - DNA, 10 bp, Artificial Sequence
  Synthetic Sequence
gagagcttat

SEQ ID NO: 5085 - DNA, 10 bp, Artificial Sequence
  Synthetic Sequence
tttgagtctt

SEQ ID NO: 5086 - DNA, 10 bp, Artificial Sequence
  Synthetic Sequence
tcatgcctta

SEQ ID NO: 5087 - DNA, 10 bp, Artificial Sequence
  Synthetic Sequence
taaggcacgt

SEQ ID NO: 5088 - DNA, 10 bp, Artificial Sequence
  Synthetic Sequence
agagtagcca

SEQ ID NO: 5089 - DNA, 10 bp, Artificial Sequence
  Synthetic Sequence
ttgtattaac

SEQ ID NO: 5090 - DNA, 10 bp, Artificial Sequence
  Synthetic Sequence
actttacaga

SEQ ID NO: 5091 - DNA, 10 bp, Artificial Sequence
  Synthetic Sequence
ttgttatgta

SEQ ID NO: 5092 - DNA, 10 bp, Artificial Sequence
  Synthetic Sequence
ctggttaaca

SEQ ID NO: 5093 - DNA, 10 bp, Artificial Sequence
  Synthetic Sequence
gcaggagaca

SEQ ID NO: 5094 - DNA, 10 bp, Artificial Sequence
  Synthetic Sequence
aggacaggag

SEQ ID NO: 5095 - DNA, 10 bp, Artificial Sequence
  Synthetic Sequence
gggtccaagg

SEQ ID NO: 5096 - DNA, 10 bp, Artificial Sequence
  Synthetic Sequence
cagccatgcg

SEQ ID NO: 5097 - DNA, 10 bp, Artificial Sequence
  Synthetic Sequence
ttattcgttt

SEQ ID NO: 5098 - DNA, 10 bp, Artificial Sequence
  Synthetic Sequence
gagcatacgc

SEQ ID NO: 5099 - DNA, 10 bp, Artificial Sequence
  Synthetic Sequence
accctgcagt

SEQ ID NO: 5100 - DNA, 10 bp, Artificial Sequence
  Synthetic Sequence
ctggcacgac

SEQ ID NO: 5101 - DNA, 10 bp, Artificial Sequence
  Synthetic Sequence
gatcggcctc

SEQ ID NO: 5102 - DNA, 10 bp, Artificial Sequence
  Synthetic Sequence
gcgactacag

SEQ ID NO: 5103 - DNA, 10 bp, Artificial Sequence
  Synthetic Sequence
ttaatcgtaa

SEQ ID NO: 5104 - DNA, 10 bp, Artificial Sequence
  Synthetic Sequence
ggtgatctcg

SEQ ID NO: 5105 - DNA, 10 bp, Artificial Sequence
  Synthetic Sequence
gtggcttaag

SEQ ID NO: 5106 - DNA, 10 bp, Artificial Sequence
  Synthetic Sequence
acggtgcgtc

SEQ ID NO: 5107 - DNA, 10 bp, Artificial Sequence
  Synthetic Sequence
tcttacttgg

SEQ ID NO: 5108 - DNA, 10 bp, Artificial Sequence
  Synthetic Sequence
tgggagccaa

SEQ ID NO: 5109 - DNA, 10 bp, Artificial Sequence
  Synthetic Sequence
agattcagac

SEQ ID NO: 5110 - DNA, 10 bp, Artificial Sequence
  Synthetic Sequence
atcttaactc

SEQ ID NO: 5111 - DNA, 10 bp, Artificial Sequence
  Synthetic Sequence
caggagtaaa

SEQ ID NO: 5112 - DNA, 10 bp, Artificial Sequence
  Synthetic Sequence
gacccgagac

SEQ ID NO: 5113 - DNA, 10 bp, Artificial Sequence
  Synthetic Sequence
tccgctcttt

SEQ ID NO: 5114 - DNA, 10 bp, Artificial Sequence
  Synthetic Sequence
agcgtagttt

SEQ ID NO: 5115 - DNA, 10 bp, Artificial Sequence
  Synthetic Sequence
atgatattga

SEQ ID NO: 5116 - DNA, 10 bp, Artificial Sequence
  Synthetic Sequence
tgctgccgtc

SEQ ID NO: 5117 - DNA, 10 bp, Artificial Sequence
  Synthetic Sequence
gaacgccaac

SEQ ID NO: 5118 - DNA, 10 bp, Artificial Sequence
  Synthetic Sequence
cagtgtggtt

SEQ ID NO: 5119 - DNA, 10 bp, Artificial Sequence
  Synthetic Sequence
tagtttgtat

SEQ ID NO: 5120 - DNA, 10 bp, Artificial Sequence
  Synthetic Sequence
gcgatcgcag

SEQ ID NO: 5121 - DNA, 10 bp, Artificial Sequence
  Synthetic Sequence
cagtcgatca

SEQ ID NO: 5122 - DNA, 10 bp, Artificial Sequence
  Synthetic Sequence
taaccaccag

SEQ ID NO: 5123 - DNA, 10 bp, Artificial Sequence
  Synthetic Sequence
aggtaattga

SEQ ID NO: 5124 - DNA, 10 bp, Artificial Sequence
  Synthetic Sequence
cctagctcag

SEQ ID NO: 5125 - DNA, 10 bp, Artificial Sequence
  Synthetic Sequence
tcgataatgc

SEQ ID NO: 5126 - DNA, 10 bp, Artificial Sequence
  Synthetic Sequence
ctctttagag

SEQ ID NO: 5127 - DNA, 10 bp, Artificial Sequence
  Synthetic Sequence
gtcacctgcc

SEQ ID NO: 5128 - DNA, 10 bp, Artificial Sequence
  Synthetic Sequence
gtcgtcgtat

SEQ ID NO: 5129 - DNA, 10 bp, Artificial Sequence
  Synthetic Sequence
gatcaatcta

SEQ ID NO: 5130 - DNA, 10 bp, Artificial Sequence
  Synthetic Sequence
tagactggac

SEQ ID NO: 5131 - DNA, 10 bp, Artificial Sequence
  Synthetic Sequence
taagtcaggg

SEQ ID NO: 5132 - DNA, 10 bp, Artificial Sequence
  Synthetic Sequence
tgctttgggt

SEQ ID NO: 5133 - DNA, 10 bp, Artificial Sequence
  Synthetic Sequence
ctcttacgtc

SEQ ID NO: 5134 - DNA, 10 bp, Artificial Sequence
  Synthetic Sequence
cataaagagc

SEQ ID NO: 5135 - DNA, 10 bp, Artificial Sequence
  Synthetic Sequence
gatgtacaac

SEQ ID NO: 5136 - DNA, 10 bp, Artificial Sequence
  Synthetic Sequence
ccgggtgtta

SEQ ID NO: 5137 - DNA, 10 bp, Artificial Sequence
  Synthetic Sequence
aggccgaaat

SEQ ID NO: 5138 - DNA, 10 bp, Artificial Sequence
  Synthetic Sequence
tcactcagga

SEQ ID NO: 5139 - DNA, 10 bp, Artificial Sequence
  Synthetic Sequence
cagaccgaac

SEQ ID NO: 5140 - DNA, 10 bp, Artificial Sequence
  Synthetic Sequence
gttgcaagac

SEQ ID NO: 5141 - DNA, 10 bp, Artificial Sequence
  Synthetic Sequence
ttaaatcgca

SEQ ID NO: 5142 - DNA, 10 bp, Artificial Sequence
  Synthetic Sequence
gaaacgtagc

SEQ ID NO: 5143 - DNA, 10 bp, Artificial Sequence
  Synthetic Sequence
cccagcacgt

SEQ ID NO: 5144 - DNA, 10 bp, Artificial Sequence
  Synthetic Sequence
gacgcttacc

SEQ ID NO: 5145 - DNA, 10 bp, Artificial Sequence
  Synthetic Sequence
cactcattct

SEQ ID NO: 5146 - DNA, 10 bp, Artificial Sequence
  Synthetic Sequence
actctgtgtt

SEQ ID NO: 5147 - DNA, 10 bp, Artificial Sequence
  Synthetic Sequence
cttctaggtt

SEQ ID NO: 5148 - DNA, 10 bp, Artificial Sequence
  Synthetic Sequence
cgctccaagc

SEQ ID NO: 5149 - DNA, 10 bp, Artificial Sequence
  Synthetic Sequence
aataggccgg

SEQ ID NO: 5150 - DNA, 10 bp, Artificial Sequence
  Synthetic Sequence
tccacactta

SEQ ID NO: 5151 - DNA, 10 bp, Artificial Sequence
  Synthetic Sequence
atccctttga

SEQ ID NO: 5152 - DNA, 10 bp, Artificial Sequence
  Synthetic Sequence
cgcttcccga

SEQ ID NO: 5153 - DNA, 10 bp, Artificial Sequence
  Synthetic Sequence
tgtgctgtag

SEQ ID NO: 5154 - DNA, 10 bp, Artificial Sequence
  Synthetic Sequence
ttcggtcgcg

SEQ ID NO: 5155 - DNA, 10 bp, Artificial Sequence
  Synthetic Sequence
gggtatccag

SEQ ID NO: 5156 - DNA, 10 bp, Artificial Sequence
  Synthetic Sequence
gcgcttggtt

SEQ ID NO: 5157 - DNA, 10 bp, Artificial Sequence
  Synthetic Sequence
ggtctgctca

SEQ ID NO: 5158 - DNA, 10 bp, Artificial Sequence
  Synthetic Sequence
agtacatata

SEQ ID NO: 5159 - DNA, 10 bp, Artificial Sequence
  Synthetic Sequence
tagacatacc

SEQ ID NO: 5160 - DNA, 10 bp, Artificial Sequence
  Synthetic Sequence
cccattattg

SEQ ID NO: 5161 - DNA, 10 bp, Artificial Sequence
  Synthetic Sequence
ctagttcgca

SEQ ID NO: 5162 - DNA, 10 bp, Artificial Sequence
  Synthetic Sequence
gcgtggagaa

SEQ ID NO: 5163 - DNA, 10 bp, Artificial Sequence
  Synthetic Sequence
gacgggttcg

SEQ ID NO: 5164 - DNA, 10 bp, Artificial Sequence
  Synthetic Sequence
tggtacgaat

SEQ ID NO: 5165 - DNA, 10 bp, Artificial Sequence
  Synthetic Sequence
atgcgtgttc

SEQ ID NO: 5166 - DNA, 10 bp, Artificial Sequence
  Synthetic Sequence
ataaagagca

SEQ ID NO: 5167 - DNA, 10 bp, Artificial Sequence
  Synthetic Sequence
tgcattagca

SEQ ID NO: 5168 - DNA, 10 bp, Artificial Sequence
  Synthetic Sequence
tgatgttgtg

SEQ ID NO: 5169 - DNA, 10 bp, Artificial Sequence
  Synthetic Sequence
gcggttaata

SEQ ID NO: 5170 - DNA, 10 bp, Artificial Sequence
  Synthetic Sequence
cctctatacg

SEQ ID NO: 5171 - DNA, 10 bp, Artificial Sequence
  Synthetic Sequence
gaaagactta

SEQ ID NO: 5172 - DNA, 10 bp, Artificial Sequence
  Synthetic Sequence
tcgtcagctt

SEQ ID NO: 5173 - DNA, 10 bp, Artificial Sequence
  Synthetic Sequence
tagccagtgc

SEQ ID NO: 5174 - DNA, 10 bp, Artificial Sequence
  Synthetic Sequence
tcgatcggta

SEQ ID NO: 5175 - DNA, 10 bp, Artificial Sequence
  Synthetic Sequence
tcaaggacaa

SEQ ID NO: 5176 - DNA, 10 bp, Artificial Sequence
  Synthetic Sequence
atgaagattt

SEQ ID NO: 5177 - DNA, 10 bp, Artificial Sequence
  Synthetic Sequence
gagatagaca

SEQ ID NO: 5178 - DNA, 10 bp, Artificial Sequence
  Synthetic Sequence
gttatcttcg

SEQ ID NO: 5179 - DNA, 10 bp, Artificial Sequence
  Synthetic Sequence
atccaggcca

SEQ ID NO: 5180 - DNA, 10 bp, Artificial Sequence
  Synthetic Sequence
agtggagata

SEQ ID NO: 5181 - DNA, 10 bp, Artificial Sequence
  Synthetic Sequence
tagggaatca

SEQ ID NO: 5182 - DNA, 10 bp, Artificial Sequence
  Synthetic Sequence
atcggcaatt

SEQ ID NO: 5183 - DNA, 10 bp, Artificial Sequence
  Synthetic Sequence
ttagcagggc

SEQ ID NO: 5184 - DNA, 10 bp, Artificial Sequence
  Synthetic Sequence
cggcgtaggt

SEQ ID NO: 5185 - DNA, 10 bp, Artificial Sequence
  Synthetic Sequence
aacgtattcc

SEQ ID NO: 5186 - DNA, 10 bp, Artificial Sequence
  Synthetic Sequence
gtaacacagc

SEQ ID NO: 5187 - DNA, 10 bp, Artificial Sequence
  Synthetic Sequence
ggagacctgg

SEQ ID NO: 5188 - DNA, 10 bp, Artificial Sequence
  Synthetic Sequence
taatacccaa

SEQ ID NO: 5189 - DNA, 10 bp, Artificial Sequence
  Synthetic Sequence
gtttgtgtcg

SEQ ID NO: 5190 - DNA, 10 bp, Artificial Sequence
  Synthetic Sequence
acacagactt

SEQ ID NO: 5191 - DNA, 10 bp, Artificial Sequence
  Synthetic Sequence
actaacggga

SEQ ID NO: 5192 - DNA, 10 bp, Artificial Sequence
  Synthetic Sequence
accttcgcta

SEQ ID NO: 5193 - DNA, 10 bp, Artificial Sequence
  Synthetic Sequence
ctgcggatct

SEQ ID NO: 5194 - DNA, 10 bp, Artificial Sequence
  Synthetic Sequence
gctaaccggg

SEQ ID NO: 5195 - DNA, 10 bp, Artificial Sequence
  Synthetic Sequence
tgctattata

SEQ ID NO: 5196 - DNA, 10 bp, Artificial Sequence
  Synthetic Sequence
ctaactccct

SEQ ID NO: 5197 - DNA, 10 bp, Artificial Sequence
  Synthetic Sequence
aatcctttat

SEQ ID NO: 5198 - DNA, 10 bp, Artificial Sequence
  Synthetic Sequence
cagttaaggg

SEQ ID NO: 5199 - DNA, 10 bp, Artificial Sequence
  Synthetic Sequence
tcactaagcg

SEQ ID NO: 5200 - DNA, 10 bp, Artificial Sequence
  Synthetic Sequence
ctagccacag

SEQ ID NO: 5201 - DNA, 10 bp, Artificial Sequence
  Synthetic Sequence
ggtagactca

SEQ ID NO: 5202 - DNA, 10 bp, Artificial Sequence
  Synthetic Sequence
agtatgtggt

SEQ ID NO: 5203 - DNA, 10 bp, Artificial Sequence
  Synthetic Sequence
aggtagataa

SEQ ID NO: 5204 - DNA, 10 bp, Artificial Sequence
  Synthetic Sequence
cgaacccgtc

SEQ ID NO: 5205 - DNA, 10 bp, Artificial Sequence
  Synthetic Sequence
cgctaacggc

SEQ ID NO: 5206 - DNA, 10 bp, Artificial Sequence
  Synthetic Sequence
cggcggtgaa

SEQ ID NO: 5207 - DNA, 10 bp, Artificial Sequence
  Synthetic Sequence
gcaagcccaa

SEQ ID NO: 5208 - DNA, 10 bp, Artificial Sequence
  Synthetic Sequence
ctcacctatt

SEQ ID NO: 5209 - DNA, 10 bp, Artificial Sequence
  Synthetic Sequence
tatcgattga

SEQ ID NO: 5210 - DNA, 10 bp, Artificial Sequence
  Synthetic Sequence
aacggcctgt

SEQ ID NO: 5211 - DNA, 10 bp, Artificial Sequence
  Synthetic Sequence
gggctggcta

SEQ ID NO: 5212 - DNA, 10 bp, Artificial Sequence
  Synthetic Sequence
gtaatccttt

SEQ ID NO: 5213 - DNA, 10 bp, Artificial Sequence
  Synthetic Sequence
agctgtaagg

SEQ ID NO: 5214 - DNA, 10 bp, Artificial Sequence
  Synthetic Sequence
aggacgacgc

SEQ ID NO: 5215 - DNA, 10 bp, Artificial Sequence
  Synthetic Sequence
gagcggttgt

SEQ ID NO: 5216 - DNA, 10 bp, Artificial Sequence
  Synthetic Sequence
actccgacgc

SEQ ID NO: 5217 - DNA, 10 bp, Artificial Sequence
  Synthetic Sequence
ttgtgagtga

SEQ ID NO: 5218 - DNA, 10 bp, Artificial Sequence
  Synthetic Sequence
caataaggac

SEQ ID NO: 5219 - DNA, 10 bp, Artificial Sequence
  Synthetic Sequence
agtacctgaa

SEQ ID NO: 5220 - DNA, 10 bp, Artificial Sequence
  Synthetic Sequence
ctgcgttact

SEQ ID NO: 5221 - DNA, 10 bp, Artificial Sequence
  Synthetic Sequence
tgcggcttac

SEQ ID NO: 5222 - DNA, 10 bp, Artificial Sequence
  Synthetic Sequence
tgactgtgca

SEQ ID NO: 5223 - DNA, 10 bp, Artificial Sequence
  Synthetic Sequence
cgggtcgtga

SEQ ID NO: 5224 - DNA, 10 bp, Artificial Sequence
  Synthetic Sequence
acactttacg

SEQ ID NO: 5225 - DNA, 10 bp, Artificial Sequence
  Synthetic Sequence
agtcccaagt

SEQ ID NO: 5226 - DNA, 10 bp, Artificial Sequence
  Synthetic Sequence
ggagaacaaa

SEQ ID NO: 5227 - DNA, 10 bp, Artificial Sequence
  Synthetic Sequence
agccgtaacc

SEQ ID NO: 5228 - DNA, 10 bp, Artificial Sequence
  Synthetic Sequence
tctggccacg

SEQ ID NO: 5229 - DNA, 10 bp, Artificial Sequence
  Synthetic Sequence
tggccagcat

SEQ ID NO: 5230 - DNA, 10 bp, Artificial Sequence
  Synthetic Sequence
atcaagcgat

SEQ ID NO: 5231 - DNA, 10 bp, Artificial Sequence
  Synthetic Sequence
aactcagcgg

SEQ ID NO: 5232 - DNA, 10 bp, Artificial Sequence
  Synthetic Sequence
ggttgtaagt

SEQ ID NO: 5233 - DNA, 10 bp, Artificial Sequence
  Synthetic Sequence
cagactacac

SEQ ID NO: 5234 - DNA, 10 bp, Artificial Sequence
  Synthetic Sequence
cactgagaat

SEQ ID NO: 5235 - DNA, 10 bp, Artificial Sequence
  Synthetic Sequence
tttgactaag

SEQ ID NO: 5236 - DNA, 10 bp, Artificial Sequence
  Synthetic Sequence
gcagacttcg

SEQ ID NO: 5237 - DNA, 10 bp, Artificial Sequence
  Synthetic Sequence
ctagttgtct

SEQ ID NO: 5238 - DNA, 10 bp, Artificial Sequence
  Synthetic Sequence
gctatccaag

SEQ ID NO: 5239 - DNA, 10 bp, Artificial Sequence
  Synthetic Sequence
tcttctctcc

SEQ ID NO: 5240 - DNA, 10 bp, Artificial Sequence
  Synthetic Sequence
ggaaggcagg

SEQ ID NO: 5241 - DNA, 10 bp, Artificial Sequence
  Synthetic Sequence
ggttcatcta

SEQ ID NO: 5242 - DNA, 10 bp, Artificial Sequence
  Synthetic Sequence
ggatgatagc

SEQ ID NO: 5243 - DNA, 10 bp, Artificial Sequence
  Synthetic Sequence
ccttcgaacc

SEQ ID NO: 5244 - DNA, 10 bp, Artificial Sequence
  Synthetic Sequence
gatgttagct

SEQ ID NO: 5245 - DNA, 10 bp, Artificial Sequence
  Synthetic Sequence
gggacaaacc

SEQ ID NO: 5246 - DNA, 10 bp, Artificial Sequence
  Synthetic Sequence
ctcgcgcaaa

SEQ ID NO: 5247 - DNA, 10 bp, Artificial Sequence
  Synthetic Sequence
caaacgcatg

SEQ ID NO: 5248 - DNA, 10 bp, Artificial Sequence
  Synthetic Sequence
tgaggaagcc

SEQ ID NO: 5249 - DNA, 10 bp, Artificial Sequence
  Synthetic Sequence
tcttggtgat

SEQ ID NO: 5250 - DNA, 10 bp, Artificial Sequence
  Synthetic Sequence
cttaacccac

SEQ ID NO: 5251 - DNA, 10 bp, Artificial Sequence
  Synthetic Sequence
tcccgattta

SEQ ID NO: 5252 - DNA, 10 bp, Artificial Sequence
  Synthetic Sequence
gagcaaatca

SEQ ID NO: 5253 - DNA, 10 bp, Artificial Sequence
  Synthetic Sequence
tcagctgtaa

SEQ ID NO: 5254 - DNA, 10 bp, Artificial Sequence
  Synthetic Sequence
tcgcgggttt

SEQ ID NO: 5255 - DNA, 10 bp, Artificial Sequence
  Synthetic Sequence
tcggacacag

SEQ ID NO: 5256 - DNA, 10 bp, Artificial Sequence
  Synthetic Sequence
gaactccgtc

SEQ ID NO: 5257 - DNA, 10 bp, Artificial Sequence
  Synthetic Sequence
accatattgg

SEQ ID NO: 5258 - DNA, 10 bp, Artificial Sequence
  Synthetic Sequence
tttatgtaga

SEQ ID NO: 5259 - DNA, 10 bp, Artificial Sequence
  Synthetic Sequence
ctacgcacga

SEQ ID NO: 5260 - DNA, 10 bp, Artificial Sequence
  Synthetic Sequence
gatcggagaa

SEQ ID NO: 5261 - DNA, 10 bp, Artificial Sequence
  Synthetic Sequence
tgacttaatg

SEQ ID NO: 5262 - DNA, 10 bp, Artificial Sequence
  Synthetic Sequence
cgttaggtta

SEQ ID NO: 5263 - DNA, 10 bp, Artificial Sequence
  Synthetic Sequence
tcaactaccc

SEQ ID NO: 5264 - DNA, 10 bp, Artificial Sequence
  Synthetic Sequence
agcgcaacag

SEQ ID NO: 5265 - DNA, 10 bp, Artificial Sequence
  Synthetic Sequence
cgtttacata

SEQ ID NO: 5266 - DNA, 10 bp, Artificial Sequence
  Synthetic Sequence
tccaacatca

SEQ ID NO: 5267 - DNA, 10 bp, Artificial Sequence
  Synthetic Sequence
gagagggtcc

SEQ ID NO: 5268 - DNA, 10 bp, Artificial Sequence
  Synthetic Sequence
ccgaaaccgc

SEQ ID NO: 5269 - DNA, 10 bp, Artificial Sequence
  Synthetic Sequence
tctctgaccc

SEQ ID NO: 5270 - DNA, 10 bp, Artificial Sequence
  Synthetic Sequence
ggtagggtgg

SEQ ID NO: 5271 - DNA, 10 bp, Artificial Sequence
  Synthetic Sequence
tgatacaata

SEQ ID NO: 5272 - DNA, 10 bp, Artificial Sequence
  Synthetic Sequence
attctattac

SEQ ID NO: 5273 - DNA, 10 bp, Artificial Sequence
  Synthetic Sequence
acacgaggtt

SEQ ID NO: 5274 - DNA, 10 bp, Artificial Sequence
  Synthetic Sequence
ggtatgaaag

SEQ ID NO: 5275 - DNA, 10 bp, Artificial Sequence
  Synthetic Sequence
ggctttgtat

SEQ ID NO: 5276 - DNA, 10 bp, Artificial Sequence
  Synthetic Sequence
acggagacct

SEQ ID NO: 5277 - DNA, 10 bp, Artificial Sequence
  Synthetic Sequence
ggatgcacgc

SEQ ID NO: 5278 - DNA, 10 bp, Artificial Sequence
  Synthetic Sequence
cgcgttatta

SEQ ID NO: 5279 - DNA, 10 bp, Artificial Sequence
  Synthetic Sequence
cctttggccg

SEQ ID NO: 5280 - DNA, 10 bp, Artificial Sequence
  Synthetic Sequence
gaggtatcat

SEQ ID NO: 5281 - DNA, 10 bp, Artificial Sequence
  Synthetic Sequence
cattcggaca

SEQ ID NO: 5282 - DNA, 10 bp, Artificial Sequence
  Synthetic Sequence
cgtaaccgga

SEQ ID NO: 5283 - DNA, 10 bp, Artificial Sequence
  Synthetic Sequence
gagggatagc

SEQ ID NO: 5284 - DNA, 10 bp, Artificial Sequence
  Synthetic Sequence
attatgttgg

SEQ ID NO: 5285 - DNA, 10 bp, Artificial Sequence
  Synthetic Sequence
gcttaacact

SEQ ID NO: 5286 - DNA, 10 bp, Artificial Sequence
  Synthetic Sequence
caactaacca

SEQ ID NO: 5287 - DNA, 10 bp, Artificial Sequence
  Synthetic Sequence
gtcgaagtgc

SEQ ID NO: 5288 - DNA, 10 bp, Artificial Sequence
  Synthetic Sequence
attaagacta

SEQ ID NO: 5289 - DNA, 10 bp, Artificial Sequence
  Synthetic Sequence
ccagtatatc

SEQ ID NO: 5290 - DNA, 10 bp, Artificial Sequence
  Synthetic Sequence
gcgatggcca

SEQ ID NO: 5291 - DNA, 10 bp, Artificial Sequence
  Synthetic Sequence
caactggtgt

SEQ ID NO: 5292 - DNA, 10 bp, Artificial Sequence
  Synthetic Sequence
cctgtcgtgc

SEQ ID NO: 5293 - DNA, 10 bp, Artificial Sequence
  Synthetic Sequence
tcgcatctta

SEQ ID NO: 5294 - DNA, 10 bp, Artificial Sequence
  Synthetic Sequence
gggcataatg

SEQ ID NO: 5295 - DNA, 10 bp, Artificial Sequence
  Synthetic Sequence
taagctcgat

SEQ ID NO: 5296 - DNA, 10 bp, Artificial Sequence
  Synthetic Sequence
tttgccggac

SEQ ID NO: 5297 - DNA, 10 bp, Artificial Sequence
  Synthetic Sequence
cctcacagga

SEQ ID NO: 5298 - DNA, 10 bp, Artificial Sequence
  Synthetic Sequence
cgaagaacca

SEQ ID NO: 5299 - DNA, 10 bp, Artificial Sequence
  Synthetic Sequence
ttaattaata

SEQ ID NO: 5300 - DNA, 10 bp, Artificial Sequence
  Synthetic Sequence
atcagaaact

SEQ ID NO: 5301 - DNA, 10 bp, Artificial Sequence
  Synthetic Sequence
ttctgcaatc

SEQ ID NO: 5302 - DNA, 10 bp, Artificial Sequence
  Synthetic Sequence
gtcaattaaa

SEQ ID NO: 5303 - DNA, 10 bp, Artificial Sequence
  Synthetic Sequence
tctaccgacg

SEQ ID NO: 5304 - DNA, 10 bp, Artificial Sequence
  Synthetic Sequence
aggctcaaga

SEQ ID NO: 5305 - DNA, 10 bp, Artificial Sequence
  Synthetic Sequence
gactggacaa

SEQ ID NO: 5306 - DNA, 10 bp, Artificial Sequence
  Synthetic Sequence
tactctgcga

SEQ ID NO: 5307 - DNA, 10 bp, Artificial Sequence
  Synthetic Sequence
ctttaactct

SEQ ID NO: 5308 - DNA, 10 bp, Artificial Sequence
  Synthetic Sequence
gtgcctgagc

SEQ ID NO: 5309 - DNA, 10 bp, Artificial Sequence
  Synthetic Sequence
gaagaattaa

SEQ ID NO: 5310 - DNA, 10 bp, Artificial Sequence
  Synthetic Sequence
ctcaggtctc

SEQ ID NO: 5311 - DNA, 10 bp, Artificial Sequence
  Synthetic Sequence
aggtgggtag

SEQ ID NO: 5312 - DNA, 10 bp, Artificial Sequence
  Synthetic Sequence
ttagagttca

SEQ ID NO: 5313 - DNA, 10 bp, Artificial Sequence
  Synthetic Sequence
agaggtatgt

SEQ ID NO: 5314 - DNA, 10 bp, Artificial Sequence
  Synthetic Sequence
gttattccct

SEQ ID NO: 5315 - DNA, 10 bp, Artificial Sequence
  Synthetic Sequence
aagtaagtct

SEQ ID NO: 5316 - DNA, 10 bp, Artificial Sequence
  Synthetic Sequence
aatctgcccg

SEQ ID NO: 5317 - DNA, 10 bp, Artificial Sequence
  Synthetic Sequence
ccatgcactg

SEQ ID NO: 5318 - DNA, 10 bp, Artificial Sequence
  Synthetic Sequence
tataagaaag

SEQ ID NO: 5319 - DNA, 10 bp, Artificial Sequence
  Synthetic Sequence
ttgtgtagcg

SEQ ID NO: 5320 - DNA, 10 bp, Artificial Sequence
  Synthetic Sequence
atatgttact

SEQ ID NO: 5321 - DNA, 10 bp, Artificial Sequence
  Synthetic Sequence
tcaaataact

SEQ ID NO: 5322 - DNA, 10 bp, Artificial Sequence
  Synthetic Sequence
gttcggaacg

SEQ ID NO: 5323 - DNA, 10 bp, Artificial Sequence
  Synthetic Sequence
cgcgtctacc

SEQ ID NO: 5324 - DNA, 10 bp, Artificial Sequence
  Synthetic Sequence
gagggtaagt

SEQ ID NO: 5325 - DNA, 10 bp, Artificial Sequence
  Synthetic Sequence
ccacggcaat

SEQ ID NO: 5326 - DNA, 10 bp, Artificial Sequence
  Synthetic Sequence
ggttagtcgt

SEQ ID NO: 5327 - DNA, 10 bp, Artificial Sequence
  Synthetic Sequence
gactagagcg

SEQ ID NO: 5328 - DNA, 10 bp, Artificial Sequence
  Synthetic Sequence
gaacggtgcg

SEQ ID NO: 5329 - DNA, 10 bp, Artificial Sequence
  Synthetic Sequence
gaatgtagca

SEQ ID NO: 5330 - DNA, 10 bp, Artificial Sequence
  Synthetic Sequence
ttgcacgcaa

SEQ ID NO: 5331 - DNA, 10 bp, Artificial Sequence
  Synthetic Sequence
agcttctgcg

SEQ ID NO: 5332 - DNA, 10 bp, Artificial Sequence
  Synthetic Sequence
cggaggctat

SEQ ID NO: 5333 - DNA, 10 bp, Artificial Sequence
  Synthetic Sequence
ttggtgccgt

SEQ ID NO: 5334 - DNA, 10 bp, Artificial Sequence
  Synthetic Sequence
tcgcgcattc

SEQ ID NO: 5335 - DNA, 10 bp, Artificial Sequence
  Synthetic Sequence
ttaagaaacc

SEQ ID NO: 5336 - DNA, 10 bp, Artificial Sequence
  Synthetic Sequence
ttacaagaca

SEQ ID NO: 5337 - DNA, 10 bp, Artificial Sequence
  Synthetic Sequence
cactttgaca

SEQ ID NO: 5338 - DNA, 10 bp, Artificial Sequence
  Synthetic Sequence
aagccgtgga

SEQ ID NO: 5339 - DNA, 10 bp, Artificial Sequence
  Synthetic Sequence
acgagacaat

SEQ ID NO: 5340 - DNA, 10 bp, Artificial Sequence
  Synthetic Sequence
gcaactgacc

SEQ ID NO: 5341 - DNA, 10 bp, Artificial Sequence
  Synthetic Sequence
tatggagcat

SEQ ID NO: 5342 - DNA, 10 bp, Artificial Sequence
  Synthetic Sequence
cgttagctat

SEQ ID NO: 5343 - DNA, 10 bp, Artificial Sequence
  Synthetic Sequence
agttcgtatt

SEQ ID NO: 5344 - DNA, 10 bp, Artificial Sequence
  Synthetic Sequence
tcatgggctc

SEQ ID NO: 5345 - DNA, 10 bp, Artificial Sequence
  Synthetic Sequence
cgttcgttcc

SEQ ID NO: 5346 - DNA, 10 bp, Artificial Sequence
  Synthetic Sequence
catgataaat

SEQ ID NO: 5347 - DNA, 10 bp, Artificial Sequence
  Synthetic Sequence
ctaggttgat

SEQ ID NO: 5348 - DNA, 10 bp, Artificial Sequence
  Synthetic Sequence
cggcctcgaa

SEQ ID NO: 5349 - DNA, 10 bp, Artificial Sequence
  Synthetic Sequence
agttacccat

SEQ ID NO: 5350 - DNA, 10 bp, Artificial Sequence
  Synthetic Sequence
ctgtgtcgcc

SEQ ID NO: 5351 - DNA, 10 bp, Artificial Sequence
  Synthetic Sequence
acgaggagct

SEQ ID NO: 5352 - DNA, 10 bp, Artificial Sequence
  Synthetic Sequence
gacccaccac

SEQ ID NO: 5353 - DNA, 10 bp, Artificial Sequence
  Synthetic Sequence
aaacttcacc

SEQ ID NO: 5354 - DNA, 10 bp, Artificial Sequence
  Synthetic Sequence
aggccctatt

SEQ ID NO: 5355 - DNA, 10 bp, Artificial Sequence
  Synthetic Sequence
gtggctctat

SEQ ID NO: 5356 - DNA, 10 bp, Artificial Sequence
  Synthetic Sequence
atgcataaat

SEQ ID NO: 5357 - DNA, 10 bp, Artificial Sequence
  Synthetic Sequence
tcttagagaa

SEQ ID NO: 5358 - DNA, 10 bp, Artificial Sequence
  Synthetic Sequence
cagtgaccaa

SEQ ID NO: 5359 - DNA, 10 bp, Artificial Sequence
  Synthetic Sequence
gcgaatcgct

SEQ ID NO: 5360 - DNA, 10 bp, Artificial Sequence
  Synthetic Sequence
gtgatcgacg

SEQ ID NO: 5361 - DNA, 10 bp, Artificial Sequence
  Synthetic Sequence
tactatatga

SEQ ID NO: 5362 - DNA, 10 bp, Artificial Sequence
  Synthetic Sequence
ggaatcgcta

SEQ ID NO: 5363 - DNA, 10 bp, Artificial Sequence
  Synthetic Sequence
ccataaggga

SEQ ID NO: 5364 - DNA, 10 bp, Artificial Sequence
  Synthetic Sequence
cgcctgtcgt

SEQ ID NO: 5365 - DNA, 10 bp, Artificial Sequence
  Synthetic Sequence
agctcgctca

SEQ ID NO: 5366 - DNA, 10 bp, Artificial Sequence
  Synthetic Sequence
gtctgtgaaa

SEQ ID NO: 5367 - DNA, 10 bp, Artificial Sequence
  Synthetic Sequence
ggccggtaaa

SEQ ID NO: 5368 - DNA, 10 bp, Artificial Sequence
  Synthetic Sequence
cgggtggcaa

SEQ ID NO: 5369 - DNA, 10 bp, Artificial Sequence
  Synthetic Sequence
gctcatctcc

SEQ ID NO: 5370 - DNA, 10 bp, Artificial Sequence
  Synthetic Sequence
tccatagtgt

SEQ ID NO: 5371 - DNA, 10 bp, Artificial Sequence
  Synthetic Sequence
ttgtactggg

SEQ ID NO: 5372 - DNA, 10 bp, Artificial Sequence
  Synthetic Sequence
aatttcgtat

SEQ ID NO: 5373 - DNA, 10 bp, Artificial Sequence
  Synthetic Sequence
tagttatccc

SEQ ID NO: 5374 - DNA, 10 bp, Artificial Sequence
  Synthetic Sequence
tatttgttta

SEQ ID NO: 5375 - DNA, 10 bp, Artificial Sequence
  Synthetic Sequence
tcagtgcagc

SEQ ID NO: 5376 - DNA, 10 bp, Artificial Sequence
  Synthetic Sequence
tacctcatgt

SEQ ID NO: 5377 - DNA, 10 bp, Artificial Sequence
  Synthetic Sequence
cgtggtacgt

SEQ ID NO: 5378 - DNA, 10 bp, Artificial Sequence
  Synthetic Sequence
ccacgtttaa

SEQ ID NO: 5379 - DNA, 10 bp, Artificial Sequence
  Synthetic Sequence
agcagtctgg

SEQ ID NO: 5380 - DNA, 10 bp, Artificial Sequence
  Synthetic Sequence
aaatgggtta

SEQ ID NO: 5381 - DNA, 10 bp, Artificial Sequence
  Synthetic Sequence
gttgtctttc

SEQ ID NO: 5382 - DNA, 10 bp, Artificial Sequence
  Synthetic Sequence
gagctgtcag

SEQ ID NO: 5383 - DNA, 10 bp, Artificial Sequence
  Synthetic Sequence
acatgcggcc

SEQ ID NO: 5384 - DNA, 10 bp, Artificial Sequence
  Synthetic Sequence
gccagaccat

SEQ ID NO: 5385 - DNA, 10 bp, Artificial Sequence
  Synthetic Sequence
gtatggtgac

SEQ ID NO: 5386 - DNA, 10 bp, Artificial Sequence
  Synthetic Sequence
caagatctaa

SEQ ID NO: 5387 - DNA, 10 bp, Artificial Sequence
  Synthetic Sequence
gcatcgttgc

SEQ ID NO: 5388 - DNA, 10 bp, Artificial Sequence
  Synthetic Sequence
gattgagagc

SEQ ID NO: 5389 - DNA, 10 bp, Artificial Sequence
  Synthetic Sequence
gggaacgacc

SEQ ID NO: 5390 - DNA, 10 bp, Artificial Sequence
  Synthetic Sequence
ccgagagaac

SEQ ID NO: 5391 - DNA, 10 bp, Artificial Sequence
  Synthetic Sequence
ctctgtggta

SEQ ID NO: 5392 - DNA, 10 bp, Artificial Sequence
  Synthetic Sequence
ctatatagat

SEQ ID NO: 5393 - DNA, 10 bp, Artificial Sequence
  Synthetic Sequence
tctatatgat

SEQ ID NO: 5394 - DNA, 10 bp, Artificial Sequence
  Synthetic Sequence
ctatagcatg

SEQ ID NO: 5395 - DNA, 10 bp, Artificial Sequence
  Synthetic Sequence
taggatcact

SEQ ID NO: 5396 - DNA, 10 bp, Artificial Sequence
  Synthetic Sequence
ccagaataga

SEQ ID NO: 5397 - DNA, 10 bp, Artificial Sequence
  Synthetic Sequence
ttagataccg

SEQ ID NO: 5398 - DNA, 10 bp, Artificial Sequence
  Synthetic Sequence
aatagtggag

SEQ ID NO: 5399 - DNA, 10 bp, Artificial Sequence
  Synthetic Sequence
aagagtaacg

SEQ ID NO: 5400 - DNA, 10 bp, Artificial Sequence
  Synthetic Sequence
ctcgatttgg

SEQ ID NO: 5401 - DNA, 10 bp, Artificial Sequence
  Synthetic Sequence
gttgggctca

SEQ ID NO: 5402 - DNA, 10 bp, Artificial Sequence
  Synthetic Sequence
aacgacataa

SEQ ID NO: 5403 - DNA, 10 bp, Artificial Sequence
  Synthetic Sequence
gttaagttcc

SEQ ID NO: 5404 - DNA, 10 bp, Artificial Sequence
  Synthetic Sequence
gcatttacac

SEQ ID NO: 5405 - DNA, 10 bp, Artificial Sequence
  Synthetic Sequence
ggcccgcaat

SEQ ID NO: 5406 - DNA, 10 bp, Artificial Sequence
  Synthetic Sequence
taggtccaca

SEQ ID NO: 5407 - DNA, 10 bp, Artificial Sequence
  Synthetic Sequence
ttgtaaatag

SEQ ID NO: 5408 - DNA, 10 bp, Artificial Sequence
  Synthetic Sequence
gacctcaggg

SEQ ID NO: 5409 - DNA, 10 bp, Artificial Sequence
  Synthetic Sequence
tgcgcgcaga

SEQ ID NO: 5410 - DNA, 10 bp, Artificial Sequence
  Synthetic Sequence
acacgattgc

SEQ ID NO: 5411 - DNA, 10 bp, Artificial Sequence
  Synthetic Sequence
agtcgacctg

SEQ ID NO: 5412 - DNA, 10 bp, Artificial Sequence
  Synthetic Sequence
acacgatgcg

SEQ ID NO: 5413 - DNA, 10 bp, Artificial Sequence
  Synthetic Sequence
tttatacagt

SEQ ID NO: 5414 - DNA, 10 bp, Artificial Sequence
  Synthetic Sequence
tttctggatg

SEQ ID NO: 5415 - DNA, 10 bp, Artificial Sequence
  Synthetic Sequence
gtcaacgtga

SEQ ID NO: 5416 - DNA, 10 bp, Artificial Sequence
  Synthetic Sequence
ccggtcaaac

SEQ ID NO: 5417 - DNA, 10 bp, Artificial Sequence
  Synthetic Sequence
atagaaagcc

SEQ ID NO: 5418 - DNA, 10 bp, Artificial Sequence
  Synthetic Sequence
cgacagagta

SEQ ID NO: 5419 - DNA, 10 bp, Artificial Sequence
  Synthetic Sequence
ccttatcccg

SEQ ID NO: 5420 - DNA, 10 bp, Artificial Sequence
  Synthetic Sequence
caaaccacaa

SEQ ID NO: 5421 - DNA, 10 bp, Artificial Sequence
  Synthetic Sequence
tacattcact

SEQ ID NO: 5422 - DNA, 10 bp, Artificial Sequence
  Synthetic Sequence
cccgagtaag

SEQ ID NO: 5423 - DNA, 10 bp, Artificial Sequence
  Synthetic Sequence
atcgcgggac

SEQ ID NO: 5424 - DNA, 10 bp, Artificial Sequence
  Synthetic Sequence
gcaacagtta

SEQ ID NO: 5425 - DNA, 10 bp, Artificial Sequence
  Synthetic Sequence
gtgacctcac

SEQ ID NO: 5426 - DNA, 10 bp, Artificial Sequence
  Synthetic Sequence
gtcacaccga

SEQ ID NO: 5427 - DNA, 10 bp, Artificial Sequence
  Synthetic Sequence
gtgagaaagt

SEQ ID NO: 5428 - DNA, 10 bp, Artificial Sequence
  Synthetic Sequence
atgcgttagg

SEQ ID NO: 5429 - DNA, 10 bp, Artificial Sequence
  Synthetic Sequence
gccgttagtt

SEQ ID NO: 5430 - DNA, 10 bp, Artificial Sequence
  Synthetic Sequence
gagtcgtggg

SEQ ID NO: 5431 - DNA, 10 bp, Artificial Sequence
  Synthetic Sequence
tcttatgcgt

SEQ ID NO: 5432 - DNA, 10 bp, Artificial Sequence
  Synthetic Sequence
acatcctact

SEQ ID NO: 5433 - DNA, 10 bp, Artificial Sequence
  Synthetic Sequence
accggactag

SEQ ID NO: 5434 - DNA, 10 bp, Artificial Sequence
  Synthetic Sequence
atatttcagt

SEQ ID NO: 5435 - DNA, 10 bp, Artificial Sequence
  Synthetic Sequence
ggtggcctag

SEQ ID NO: 5436 - DNA, 10 bp, Artificial Sequence
  Synthetic Sequence
cccaactgga

SEQ ID NO: 5437 - DNA, 10 bp, Artificial Sequence
  Synthetic Sequence
gatttgactt

SEQ ID NO: 5438 - DNA, 10 bp, Artificial Sequence
  Synthetic Sequence
taacaacact

SEQ ID NO: 5439 - DNA, 10 bp, Artificial Sequence
  Synthetic Sequence
cccaccagaa

SEQ ID NO: 5440 - DNA, 10 bp, Artificial Sequence
  Synthetic Sequence
gacatcgaac

SEQ ID NO: 5441 - DNA, 10 bp, Artificial Sequence
  Synthetic Sequence
cttgttaaag

SEQ ID NO: 5442 - DNA, 10 bp, Artificial Sequence
  Synthetic Sequence
ctgttaacac

SEQ ID NO: 5443 - DNA, 10 bp, Artificial Sequence
  Synthetic Sequence
gtgctccata

SEQ ID NO: 5444 - DNA, 10 bp, Artificial Sequence
  Synthetic Sequence
cacagggtat

SEQ ID NO: 5445 - DNA, 10 bp, Artificial Sequence
  Synthetic Sequence
tctcgggtcc

SEQ ID NO: 5446 - DNA, 10 bp, Artificial Sequence
  Synthetic Sequence
ggagagtgtt

SEQ ID NO: 5447 - DNA, 10 bp, Artificial Sequence
  Synthetic Sequence
ccgcgtccat

SEQ ID NO: 5448 - DNA, 10 bp, Artificial Sequence
  Synthetic Sequence
ttaatctatc

SEQ ID NO: 5449 - DNA, 10 bp, Artificial Sequence
  Synthetic Sequence
aggagacggt

SEQ ID NO: 5450 - DNA, 10 bp, Artificial Sequence
  Synthetic Sequence
tagatgagaa

SEQ ID NO: 5451 - DNA, 10 bp, Artificial Sequence
  Synthetic Sequence
aggtccgtga

SEQ ID NO: 5452 - DNA, 10 bp, Artificial Sequence
  Synthetic Sequence
attcacgttc

SEQ ID NO: 5453 - DNA, 10 bp, Artificial Sequence
  Synthetic Sequence
ttctcccgct

SEQ ID NO: 5454 - DNA, 10 bp, Artificial Sequence
  Synthetic Sequence
cttgttagtt

SEQ ID NO: 5455 - DNA, 10 bp, Artificial Sequence
  Synthetic Sequence
tggcgcagaa

SEQ ID NO: 5456 - DNA, 10 bp, Artificial Sequence
  Synthetic Sequence
cgacttcatc

SEQ ID NO: 5457 - DNA, 10 bp, Artificial Sequence
  Synthetic Sequence
gggtcccttg

SEQ ID NO: 5458 - DNA, 10 bp, Artificial Sequence
  Synthetic Sequence
tactgatgcg

SEQ ID NO: 5459 - DNA, 10 bp, Artificial Sequence
  Synthetic Sequence
cgcagtctta

SEQ ID NO: 5460 - DNA, 10 bp, Artificial Sequence
  Synthetic Sequence
ttgtgtcgat

SEQ ID NO: 5461 - DNA, 10 bp, Artificial Sequence
  Synthetic Sequence
ttcaaattga

SEQ ID NO: 5462 - DNA, 10 bp, Artificial Sequence
  Synthetic Sequence
attaggtctg

SEQ ID NO: 5463 - DNA, 10 bp, Artificial Sequence
  Synthetic Sequence
ctcttagcgt

SEQ ID NO: 5464 - DNA, 10 bp, Artificial Sequence
  Synthetic Sequence
tgccttattt

SEQ ID NO: 5465 - DNA, 10 bp, Artificial Sequence
  Synthetic Sequence
cctccgttcg

SEQ ID NO: 5466 - DNA, 10 bp, Artificial Sequence
  Synthetic Sequence
taattcagcc

SEQ ID NO: 5467 - DNA, 10 bp, Artificial Sequence
  Synthetic Sequence
tatcggcggc

SEQ ID NO: 5468 - DNA, 10 bp, Artificial Sequence
  Synthetic Sequence
gaagggctgg

SEQ ID NO: 5469 - DNA, 10 bp, Artificial Sequence
  Synthetic Sequence
cccataatct

SEQ ID NO: 5470 - DNA, 10 bp, Artificial Sequence
  Synthetic Sequence
gtaaatatgg

SEQ ID NO: 5471 - DNA, 10 bp, Artificial Sequence
  Synthetic Sequence
taaaccggcc

SEQ ID NO: 5472 - DNA, 10 bp, Artificial Sequence
  Synthetic Sequence
gtccgagggt

SEQ ID NO: 5473 - DNA, 10 bp, Artificial Sequence
  Synthetic Sequence
agttctggtc

SEQ ID NO: 5474 - DNA, 10 bp, Artificial Sequence
  Synthetic Sequence
gtacaggatg

SEQ ID NO: 5475 - DNA, 10 bp, Artificial Sequence
  Synthetic Sequence
attctctatg

SEQ ID NO: 5476 - DNA, 10 bp, Artificial Sequence
  Synthetic Sequence
taacagcgag

SEQ ID NO: 5477 - DNA, 10 bp, Artificial Sequence
  Synthetic Sequence
accttcagat

SEQ ID NO: 5478 - DNA, 10 bp, Artificial Sequence
  Synthetic Sequence
attctaccag

SEQ ID NO: 5479 - DNA, 10 bp, Artificial Sequence
  Synthetic Sequence
tgatggtctt

SEQ ID NO: 5480 - DNA, 10 bp, Artificial Sequence
  Synthetic Sequence
aacatgtgac

SEQ ID NO: 5481 - DNA, 10 bp, Artificial Sequence
  Synthetic Sequence
ggaggtaccc

SEQ ID NO: 5482 - DNA, 10 bp, Artificial Sequence
  Synthetic Sequence
gttacccggt

SEQ ID NO: 5483 - DNA, 10 bp, Artificial Sequence
  Synthetic Sequence
tcggaggatt

SEQ ID NO: 5484 - DNA, 10 bp, Artificial Sequence
  Synthetic Sequence
tgtgttacct

SEQ ID NO: 5485 - DNA, 10 bp, Artificial Sequence
  Synthetic Sequence
gtgacccttc

SEQ ID NO: 5486 - DNA, 10 bp, Artificial Sequence
  Synthetic Sequence
caggcataac

SEQ ID NO: 5487 - DNA, 10 bp, Artificial Sequence
  Synthetic Sequence
ccactgtccg

SEQ ID NO: 5488 - DNA, 10 bp, Artificial Sequence
  Synthetic Sequence
agtaggttct

SEQ ID NO: 5489 - DNA, 10 bp, Artificial Sequence
  Synthetic Sequence
agctagaaga

SEQ ID NO: 5490 - DNA, 10 bp, Artificial Sequence
  Synthetic Sequence
cgatcaatta

SEQ ID NO: 5491 - DNA, 10 bp, Artificial Sequence
  Synthetic Sequence
agggataagg

SEQ ID NO: 5492 - DNA, 10 bp, Artificial Sequence
  Synthetic Sequence
gcccgtacag

SEQ ID NO: 5493 - DNA, 10 bp, Artificial Sequence
  Synthetic Sequence
accctcgtaa

SEQ ID NO: 5494 - DNA, 10 bp, Artificial Sequence
  Synthetic Sequence
tgagtctttc

SEQ ID NO: 5495 - DNA, 10 bp, Artificial Sequence
  Synthetic Sequence
ctctaataga

SEQ ID NO: 5496 - DNA, 10 bp, Artificial Sequence
  Synthetic Sequence
ctagcccgaa

SEQ ID NO: 5497 - DNA, 10 bp, Artificial Sequence
  Synthetic Sequence
ccaggttccg

SEQ ID NO: 5498 - DNA, 10 bp, Artificial Sequence
  Synthetic Sequence
ctaaattggg

SEQ ID NO: 5499 - DNA, 10 bp, Artificial Sequence
  Synthetic Sequence
cacggacctt

SEQ ID NO: 5500 - DNA, 10 bp, Artificial Sequence
  Synthetic Sequence
cgggaagcca

SEQ ID NO: 5501 - DNA, 10 bp, Artificial Sequence
  Synthetic Sequence
ccatgaggat

SEQ ID NO: 5502 - DNA, 10 bp, Artificial Sequence
  Synthetic Sequence
tggttaccga

SEQ ID NO: 5503 - DNA, 10 bp, Artificial Sequence
  Synthetic Sequence
gaatggatat

SEQ ID NO: 5504 - DNA, 10 bp, Artificial Sequence
  Synthetic Sequence
agggagtctt

SEQ ID NO: 5505 - DNA, 10 bp, Artificial Sequence
  Synthetic Sequence
accaacaatc

SEQ ID NO: 5506 - DNA, 10 bp, Artificial Sequence
  Synthetic Sequence
taaagtgtaa

SEQ ID NO: 5507 - DNA, 10 bp, Artificial Sequence
  Synthetic Sequence
accgcaaaga

SEQ ID NO: 5508 - DNA, 10 bp, Artificial Sequence
  Synthetic Sequence
tcagctttcg

SEQ ID NO: 5509 - DNA, 10 bp, Artificial Sequence
  Synthetic Sequence
cgggcaatat

SEQ ID NO: 5510 - DNA, 10 bp, Artificial Sequence
  Synthetic Sequence
atgtatatca

SEQ ID NO: 5511 - DNA, 10 bp, Artificial Sequence
  Synthetic Sequence
gtttcgaact

SEQ ID NO: 5512 - DNA, 10 bp, Artificial Sequence
  Synthetic Sequence
tcgtgaaaca

SEQ ID NO: 5513 - DNA, 10 bp, Artificial Sequence
  Synthetic Sequence
gattcgtcac

SEQ ID NO: 5514 - DNA, 10 bp, Artificial Sequence
  Synthetic Sequence
cactcctctg

SEQ ID NO: 5515 - DNA, 10 bp, Artificial Sequence
  Synthetic Sequence
gaggctgttc

SEQ ID NO: 5516 - DNA, 10 bp, Artificial Sequence
  Synthetic Sequence
cttatcctcc

SEQ ID NO: 5517 - DNA, 10 bp, Artificial Sequence
  Synthetic Sequence
gtagtatgga

SEQ ID NO: 5518 - DNA, 10 bp, Artificial Sequence
  Synthetic Sequence
agtattccat

SEQ ID NO: 5519 - DNA, 10 bp, Artificial Sequence
  Synthetic Sequence
aacagctccg

SEQ ID NO: 5520 - DNA, 10 bp, Artificial Sequence
  Synthetic Sequence
gcgtcttgtc

SEQ ID NO: 5521 - DNA, 10 bp, Artificial Sequence
  Synthetic Sequence
aggtgccgac

SEQ ID NO: 5522 - DNA, 10 bp, Artificial Sequence
  Synthetic Sequence
ttgcttatag

SEQ ID NO: 5523 - DNA, 10 bp, Artificial Sequence
  Synthetic Sequence
aactcgcctc

SEQ ID NO: 5524 - DNA, 10 bp, Artificial Sequence
  Synthetic Sequence
taacggaatt

SEQ ID NO: 5525 - DNA, 10 bp, Artificial Sequence
  Synthetic Sequence
ctttgaagaa

SEQ ID NO: 5526 - DNA, 10 bp, Artificial Sequence
  Synthetic Sequence
aaatttgcgt

SEQ ID NO: 5527 - DNA, 10 bp, Artificial Sequence
  Synthetic Sequence
ttggcagcag

SEQ ID NO: 5528 - DNA, 10 bp, Artificial Sequence
  Synthetic Sequence
tcccgctggt

SEQ ID NO: 5529 - DNA, 10 bp, Artificial Sequence
  Synthetic Sequence
gatgtaaatt

SEQ ID NO: 5530 - DNA, 10 bp, Artificial Sequence
  Synthetic Sequence
aacgttgctg

SEQ ID NO: 5531 - DNA, 10 bp, Artificial Sequence
  Synthetic Sequence
agccataggg

SEQ ID NO: 5532 - DNA, 10 bp, Artificial Sequence
  Synthetic Sequence
ggaagtccat

SEQ ID NO: 5533 - DNA, 10 bp, Artificial Sequence
  Synthetic Sequence
aacaatatct

SEQ ID NO: 5534 - DNA, 10 bp, Artificial Sequence
  Synthetic Sequence
actttaccac

SEQ ID NO: 5535 - DNA, 10 bp, Artificial Sequence
  Synthetic Sequence
ggaggatcgg

SEQ ID NO: 5536 - DNA, 10 bp, Artificial Sequence
  Synthetic Sequence
tctggagggt

SEQ ID NO: 5537 - DNA, 10 bp, Artificial Sequence
  Synthetic Sequence
tcgtcccttt

SEQ ID NO: 5538 - DNA, 10 bp, Artificial Sequence
  Synthetic Sequence
atctgatttg

SEQ ID NO: 5539 - DNA, 10 bp, Artificial Sequence
  Synthetic Sequence
atggcccaat

SEQ ID NO: 5540 - DNA, 10 bp, Artificial Sequence
  Synthetic Sequence
tccggaacag

SEQ ID NO: 5541 - DNA, 10 bp, Artificial Sequence
  Synthetic Sequence
agcctaaaca

SEQ ID NO: 5542 - DNA, 10 bp, Artificial Sequence
  Synthetic Sequence
gctacgctct

SEQ ID NO: 5543 - DNA, 10 bp, Artificial Sequence
  Synthetic Sequence
gattccgtag

SEQ ID NO: 5544 - DNA, 10 bp, Artificial Sequence
  Synthetic Sequence
tgtattcgtc

SEQ ID NO: 5545 - DNA, 10 bp, Artificial Sequence
  Synthetic Sequence
cttcggtccg

SEQ ID NO: 5546 - DNA, 10 bp, Artificial Sequence
  Synthetic Sequence
ataatccgcc

SEQ ID NO: 5547 - DNA, 10 bp, Artificial Sequence
  Synthetic Sequence
tcactagacc

SEQ ID NO: 5548 - DNA, 10 bp, Artificial Sequence
  Synthetic Sequence
tcagacccgc

SEQ ID NO: 5549 - DNA, 10 bp, Artificial Sequence
  Synthetic Sequence
ggagtgtacc

SEQ ID NO: 5550 - DNA, 10 bp, Artificial Sequence
  Synthetic Sequence
gggcgatcct

SEQ ID NO: 5551 - DNA, 10 bp, Artificial Sequence
  Synthetic Sequence
agttggactt

SEQ ID NO: 5552 - DNA, 10 bp, Artificial Sequence
  Synthetic Sequence
tgcaactccc

SEQ ID NO: 5553 - DNA, 10 bp, Artificial Sequence
  Synthetic Sequence
cgcgaaatgc

SEQ ID NO: 5554 - DNA, 10 bp, Artificial Sequence
  Synthetic Sequence
gctatatgta

SEQ ID NO: 5555 - DNA, 10 bp, Artificial Sequence
  Synthetic Sequence
agacatatct

SEQ ID NO: 5556 - DNA, 10 bp, Artificial Sequence
  Synthetic Sequence
tacatcccat

SEQ ID NO: 5557 - DNA, 10 bp, Artificial Sequence
  Synthetic Sequence
acagatgaca

SEQ ID NO: 5558 - DNA, 10 bp, Artificial Sequence
  Synthetic Sequence
tactctgatg

SEQ ID NO: 5559 - DNA, 10 bp, Artificial Sequence
  Synthetic Sequence
gacatgcttc

SEQ ID NO: 5560 - DNA, 10 bp, Artificial Sequence
  Synthetic Sequence
aggctcccgt

SEQ ID NO: 5561 - DNA, 10 bp, Artificial Sequence
  Synthetic Sequence
gtgacgaatt

SEQ ID NO: 5562 - DNA, 10 bp, Artificial Sequence
  Synthetic Sequence
cgtcaggatt

SEQ ID NO: 5563 - DNA, 10 bp, Artificial Sequence
  Synthetic Sequence
tgcctgcatc

SEQ ID NO: 5564 - DNA, 10 bp, Artificial Sequence
  Synthetic Sequence
tgaagagagg

SEQ ID NO: 5565 - DNA, 10 bp, Artificial Sequence
  Synthetic Sequence
ttatttggaa

SEQ ID NO: 5566 - DNA, 10 bp, Artificial Sequence
  Synthetic Sequence
tacaaggttg

SEQ ID NO: 5567 - DNA, 10 bp, Artificial Sequence
  Synthetic Sequence
ttgaaatacg

SEQ ID NO: 5568 - DNA, 10 bp, Artificial Sequence
  Synthetic Sequence
ttcacccata

SEQ ID NO: 5569 - DNA, 10 bp, Artificial Sequence
  Synthetic Sequence
ggacatgata

SEQ ID NO: 5570 - DNA, 10 bp, Artificial Sequence
  Synthetic Sequence
ttgacgcgcc

SEQ ID NO: 5571 - DNA, 10 bp, Artificial Sequence
  Synthetic Sequence
cttcgagcct

SEQ ID NO: 5572 - DNA, 10 bp, Artificial Sequence
  Synthetic Sequence
cttgttctgc

SEQ ID NO: 5573 - DNA, 10 bp, Artificial Sequence
  Synthetic Sequence
gcttcttctt

SEQ ID NO: 5574 - DNA, 10 bp, Artificial Sequence
  Synthetic Sequence
ggagacgaga

SEQ ID NO: 5575 - DNA, 10 bp, Artificial Sequence
  Synthetic Sequence
atcgttgtgc

SEQ ID NO: 5576 - DNA, 10 bp, Artificial Sequence
  Synthetic Sequence
tcgcccgatg

SEQ ID NO: 5577 - DNA, 10 bp, Artificial Sequence
  Synthetic Sequence
tatgggaagt

SEQ ID NO: 5578 - DNA, 10 bp, Artificial Sequence
  Synthetic Sequence
gaatctggcc

SEQ ID NO: 5579 - DNA, 10 bp, Artificial Sequence
  Synthetic Sequence
ctaaattaat

SEQ ID NO: 5580 - DNA, 10 bp, Artificial Sequence
  Synthetic Sequence
tatctccgag

SEQ ID NO: 5581 - DNA, 10 bp, Artificial Sequence
  Synthetic Sequence
acggtctacc

SEQ ID NO: 5582 - DNA, 10 bp, Artificial Sequence
  Synthetic Sequence
agcaggcctc

SEQ ID NO: 5583 - DNA, 10 bp, Artificial Sequence
  Synthetic Sequence
gtacgagccc

SEQ ID NO: 5584 - DNA, 10 bp, Artificial Sequence
  Synthetic Sequence
ggattgtcgc

SEQ ID NO: 5585 - DNA, 10 bp, Artificial Sequence
  Synthetic Sequence
gtcgtccgca

SEQ ID NO: 5586 - DNA, 10 bp, Artificial Sequence
  Synthetic Sequence
aagcgagggt

SEQ ID NO: 5587 - DNA, 10 bp, Artificial Sequence
  Synthetic Sequence
cgatgctgca

SEQ ID NO: 5588 - DNA, 10 bp, Artificial Sequence
  Synthetic Sequence
gcatgctcgt

SEQ ID NO: 5589 - DNA, 10 bp, Artificial Sequence
  Synthetic Sequence
cgttgctccc

SEQ ID NO: 5590 - DNA, 10 bp, Artificial Sequence
  Synthetic Sequence
tcgattatct

SEQ ID NO: 5591 - DNA, 10 bp, Artificial Sequence
  Synthetic Sequence
tatcgtgaag

SEQ ID NO: 5592 - DNA, 10 bp, Artificial Sequence
  Synthetic Sequence
ccgccttcag

SEQ ID NO: 5593 - DNA, 10 bp, Artificial Sequence
  Synthetic Sequence
cggattctag

SEQ ID NO: 5594 - DNA, 10 bp, Artificial Sequence
  Synthetic Sequence
ggatggtaag

SEQ ID NO: 5595 - DNA, 10 bp, Artificial Sequence
  Synthetic Sequence
catcgcgtgt

SEQ ID NO: 5596 - DNA, 10 bp, Artificial Sequence
  Synthetic Sequence
tccgtcgcga

SEQ ID NO: 5597 - DNA, 10 bp, Artificial Sequence
  Synthetic Sequence
accctagaga

SEQ ID NO: 5598 - DNA, 10 bp, Artificial Sequence
  Synthetic Sequence
gcggtgagct

SEQ ID NO: 5599 - DNA, 10 bp, Artificial Sequence
  Synthetic Sequence
gcggacgagt

SEQ ID NO: 5600 - DNA, 10 bp, Artificial Sequence
  Synthetic Sequence
ttgggctttc

SEQ ID NO: 5601 - DNA, 10 bp, Artificial Sequence
  Synthetic Sequence
agtctcggca

SEQ ID NO: 5602 - DNA, 10 bp, Artificial Sequence
  Synthetic Sequence
gcgacacata

SEQ ID NO: 5603 - DNA, 10 bp, Artificial Sequence
  Synthetic Sequence
ttggcgatct

SEQ ID NO: 5604 - DNA, 10 bp, Artificial Sequence
  Synthetic Sequence
accagtccta

SEQ ID NO: 5605 - DNA, 10 bp, Artificial Sequence
  Synthetic Sequence
aagctcttac

SEQ ID NO: 5606 - DNA, 10 bp, Artificial Sequence
  Synthetic Sequence
gatctgtgtc

SEQ ID NO: 5607 - DNA, 10 bp, Artificial Sequence
  Synthetic Sequence
gctgtgatta

SEQ ID NO: 5608 - DNA, 10 bp, Artificial Sequence
  Synthetic Sequence
ccgtctctcg

SEQ ID NO: 5609 - DNA, 10 bp, Artificial Sequence
  Synthetic Sequence
ggagggcaac

SEQ ID NO: 5610 - DNA, 10 bp, Artificial Sequence
  Synthetic Sequence
agtattataa

SEQ ID NO: 5611 - DNA, 10 bp, Artificial Sequence
  Synthetic Sequence
aattatcgag

SEQ ID NO: 5612 - DNA, 10 bp, Artificial Sequence
  Synthetic Sequence
atctattgcg

SEQ ID NO: 5613 - DNA, 10 bp, Artificial Sequence
  Synthetic Sequence
cgtagtgagt

SEQ ID NO: 5614 - DNA, 10 bp, Artificial Sequence
  Synthetic Sequence
ggaaatggag

SEQ ID NO: 5615 - DNA, 10 bp, Artificial Sequence
  Synthetic Sequence
agatggccca

SEQ ID NO: 5616 - DNA, 10 bp, Artificial Sequence
  Synthetic Sequence
caggaaccta

SEQ ID NO: 5617 - DNA, 10 bp, Artificial Sequence
  Synthetic Sequence
gatattgacg

SEQ ID NO: 5618 - DNA, 10 bp, Artificial Sequence
  Synthetic Sequence
tccactcgac

SEQ ID NO: 5619 - DNA, 10 bp, Artificial Sequence
  Synthetic Sequence
ctactctacg

SEQ ID NO: 5620 - DNA, 10 bp, Artificial Sequence
  Synthetic Sequence
acgtaccact

SEQ ID NO: 5621 - DNA, 10 bp, Artificial Sequence
  Synthetic Sequence
gtcggccagt

SEQ ID NO: 5622 - DNA, 10 bp, Artificial Sequence
  Synthetic Sequence
atgcacttgt

SEQ ID NO: 5623 - DNA, 10 bp, Artificial Sequence
  Synthetic Sequence
tcacaccgct

SEQ ID NO: 5624 - DNA, 10 bp, Artificial Sequence
  Synthetic Sequence
agacgtgccc

SEQ ID NO: 5625 - DNA, 10 bp, Artificial Sequence
  Synthetic Sequence
ctaggcggga

SEQ ID NO: 5626 - DNA, 10 bp, Artificial Sequence
  Synthetic Sequence
cgtgaaacaa

SEQ ID NO: 5627 - DNA, 10 bp, Artificial Sequence
  Synthetic Sequence
gcggcgacaa

SEQ ID NO: 5628 - DNA, 10 bp, Artificial Sequence
  Synthetic Sequence
attcagaaac

SEQ ID NO: 5629 - DNA, 10 bp, Artificial Sequence
  Synthetic Sequence
gaacgaccga

SEQ ID NO: 5630 - DNA, 10 bp, Artificial Sequence
  Synthetic Sequence
agggcacgct

SEQ ID NO: 5631 - DNA, 10 bp, Artificial Sequence
  Synthetic Sequence
cctgtatttg

SEQ ID NO: 5632 - DNA, 10 bp, Artificial Sequence
  Synthetic Sequence
tgtttacctt

SEQ ID NO: 5633 - DNA, 10 bp, Artificial Sequence
  Synthetic Sequence
actcttcggg

SEQ ID NO: 5634 - DNA, 10 bp, Artificial Sequence
  Synthetic Sequence
ggatacgcgt

SEQ ID NO: 5635 - DNA, 10 bp, Artificial Sequence
  Synthetic Sequence
gatgatataa

SEQ ID NO: 5636 - DNA, 10 bp, Artificial Sequence
  Synthetic Sequence
gctctaggag

SEQ ID NO: 5637 - DNA, 10 bp, Artificial Sequence
  Synthetic Sequence
atgcacagtt

SEQ ID NO: 5638 - DNA, 10 bp, Artificial Sequence
  Synthetic Sequence
agagacattc

SEQ ID NO: 5639 - DNA, 10 bp, Artificial Sequence
  Synthetic Sequence
gggctttcgg

SEQ ID NO: 5640 - DNA, 10 bp, Artificial Sequence
  Synthetic Sequence
aagaccggtc

SEQ ID NO: 5641 - DNA, 10 bp, Artificial Sequence
  Synthetic Sequence
tggaatccta

SEQ ID NO: 5642 - DNA, 10 bp, Artificial Sequence
  Synthetic Sequence
tctcgcagag

SEQ ID NO: 5643 - DNA, 10 bp, Artificial Sequence
  Synthetic Sequence
caagccaacc

SEQ ID NO: 5644 - DNA, 10 bp, Artificial Sequence
  Synthetic Sequence
ggtgttccga

SEQ ID NO: 5645 - DNA, 10 bp, Artificial Sequence
  Synthetic Sequence
catagaatct

SEQ ID NO: 5646 - DNA, 10 bp, Artificial Sequence
  Synthetic Sequence
aaccgtttaa

SEQ ID NO: 5647 - DNA, 10 bp, Artificial Sequence
  Synthetic Sequence
gagctggatg

SEQ ID NO: 5648 - DNA, 10 bp, Artificial Sequence
  Synthetic Sequence
ctggtcgaag

SEQ ID NO: 5649 - DNA, 10 bp, Artificial Sequence
  Synthetic Sequence
ccttacaata

SEQ ID NO: 5650 - DNA, 10 bp, Artificial Sequence
  Synthetic Sequence
accacttgcg

SEQ ID NO: 5651 - DNA, 10 bp, Artificial Sequence
  Synthetic Sequence
cgtgatcttc

SEQ ID NO: 5652 - DNA, 10 bp, Artificial Sequence
  Synthetic Sequence
ccggttatga

SEQ ID NO: 5653 - DNA, 10 bp, Artificial Sequence
  Synthetic Sequence
gagctaaagt

SEQ ID NO: 5654 - DNA, 10 bp, Artificial Sequence
  Synthetic Sequence
ggaccagtcc

SEQ ID NO: 5655 - DNA, 10 bp, Artificial Sequence
  Synthetic Sequence
gtttatcgaa

SEQ ID NO: 5656 - DNA, 10 bp, Artificial Sequence
  Synthetic Sequence
catcttccca

SEQ ID NO: 5657 - DNA, 10 bp, Artificial Sequence
  Synthetic Sequence
gtgatagggc

SEQ ID NO: 5658 - DNA, 10 bp, Artificial Sequence
  Synthetic Sequence
ggtggagcgt

SEQ ID NO: 5659 - DNA, 10 bp, Artificial Sequence
  Synthetic Sequence
ctgtatgcaa

SEQ ID NO: 5660 - DNA, 10 bp, Artificial Sequence
  Synthetic Sequence
acgcactgtc

SEQ ID NO: 5661 - DNA, 10 bp, Artificial Sequence
  Synthetic Sequence
atattcggtg

SEQ ID NO: 5662 - DNA, 10 bp, Artificial Sequence
  Synthetic Sequence
tacacaggct

SEQ ID NO: 5663 - DNA, 10 bp, Artificial Sequence
  Synthetic Sequence
ttcgacacgt

SEQ ID NO: 5664 - DNA, 10 bp, Artificial Sequence
  Synthetic Sequence
caaagcctaa

SEQ ID NO: 5665 - DNA, 10 bp, Artificial Sequence
  Synthetic Sequence
accggatgaa

SEQ ID NO: 5666 - DNA, 10 bp, Artificial Sequence
  Synthetic Sequence
cttcacggcc

SEQ ID NO: 5667 - DNA, 10 bp, Artificial Sequence
  Synthetic Sequence
ttgggctgct

SEQ ID NO: 5668 - DNA, 10 bp, Artificial Sequence
  Synthetic Sequence
gattgctgct

SEQ ID NO: 5669 - DNA, 10 bp, Artificial Sequence
  Synthetic Sequence
ctaacatgtg

SEQ ID NO: 5670 - DNA, 10 bp, Artificial Sequence
  Synthetic Sequence
aagtccggcg

SEQ ID NO: 5671 - DNA, 10 bp, Artificial Sequence
  Synthetic Sequence
tagtcgagac

SEQ ID NO: 5672 - DNA, 10 bp, Artificial Sequence
  Synthetic Sequence
gggctaaccc

SEQ ID NO: 5673 - DNA, 10 bp, Artificial Sequence
  Synthetic Sequence
ggagcttcta

SEQ ID NO: 5674 - DNA, 10 bp, Artificial Sequence
  Synthetic Sequence
aaaccggctt

SEQ ID NO: 5675 - DNA, 10 bp, Artificial Sequence
  Synthetic Sequence
tgacttgtac

SEQ ID NO: 5676 - DNA, 10 bp, Artificial Sequence
  Synthetic Sequence
gctggcactc

SEQ ID NO: 5677 - DNA, 10 bp, Artificial Sequence
  Synthetic Sequence
gctccagttt

SEQ ID NO: 5678 - DNA, 10 bp, Artificial Sequence
  Synthetic Sequence
agtttatcaa

SEQ ID NO: 5679 - DNA, 10 bp, Artificial Sequence
  Synthetic Sequence
tcgccgattg

SEQ ID NO: 5680 - DNA, 10 bp, Artificial Sequence
  Synthetic Sequence
tagccgtaaa

SEQ ID NO: 5681 - DNA, 10 bp, Artificial Sequence
  Synthetic Sequence
gtgcgctatc

SEQ ID NO: 5682 - DNA, 10 bp, Artificial Sequence
  Synthetic Sequence
taccactttg

SEQ ID NO: 5683 - DNA, 10 bp, Artificial Sequence
  Synthetic Sequence
accattctat

SEQ ID NO: 5684 - DNA, 10 bp, Artificial Sequence
  Synthetic Sequence
ttaaacacgg

SEQ ID NO: 5685 - DNA, 10 bp, Artificial Sequence
  Synthetic Sequence
cttactgtcc

SEQ ID NO: 5686 - DNA, 10 bp, Artificial Sequence
  Synthetic Sequence
tgttaatagg

SEQ ID NO: 5687 - DNA, 10 bp, Artificial Sequence
  Synthetic Sequence
ggtctatgtt

SEQ ID NO: 5688 - DNA, 10 bp, Artificial Sequence
  Synthetic Sequence
gggttgagta

SEQ ID NO: 5689 - DNA, 10 bp, Artificial Sequence
  Synthetic Sequence
ccatacgccc

SEQ ID NO: 5690 - DNA, 10 bp, Artificial Sequence
  Synthetic Sequence
aggcctctgt

SEQ ID NO: 5691 - DNA, 10 bp, Artificial Sequence
  Synthetic Sequence
ccaactcgta

SEQ ID NO: 5692 - DNA, 10 bp, Artificial Sequence
  Synthetic Sequence
cagtgtcaag

SEQ ID NO: 5693 - DNA, 10 bp, Artificial Sequence
  Synthetic Sequence
tagccttatc

SEQ ID NO: 5694 - DNA, 10 bp, Artificial Sequence
  Synthetic Sequence
cctcatctgg

SEQ ID NO: 5695 - DNA, 10 bp, Artificial Sequence
  Synthetic Sequence
ggtgaaagtt

SEQ ID NO: 5696 - DNA, 10 bp, Artificial Sequence
  Synthetic Sequence
ttgtgtatta

SEQ ID NO: 5697 - DNA, 10 bp, Artificial Sequence
  Synthetic Sequence
gccattggaa

SEQ ID NO: 5698 - DNA, 10 bp, Artificial Sequence
  Synthetic Sequence
tgagaacagg

SEQ ID NO: 5699 - DNA, 10 bp, Artificial Sequence
  Synthetic Sequence
aaggtgcgga

SEQ ID NO: 5700 - DNA, 10 bp, Artificial Sequence
  Synthetic Sequence
tacctgacaa

SEQ ID NO: 5701 - DNA, 10 bp, Artificial Sequence
  Synthetic Sequence
tgatgttagt

SEQ ID NO: 5702 - DNA, 10 bp, Artificial Sequence
  Synthetic Sequence
agaaagtttg

SEQ ID NO: 5703 - DNA, 10 bp, Artificial Sequence
  Synthetic Sequence
gcacatcgca

SEQ ID NO: 5704 - DNA, 10 bp, Artificial Sequence
  Synthetic Sequence
gtcaggcaag

SEQ ID NO: 5705 - DNA, 10 bp, Artificial Sequence
  Synthetic Sequence
tgtttcggcc

SEQ ID NO: 5706 - DNA, 10 bp, Artificial Sequence
  Synthetic Sequence
ggtacgagga

SEQ ID NO: 5707 - DNA, 10 bp, Artificial Sequence
  Synthetic Sequence
gtggtccctg

SEQ ID NO: 5708 - DNA, 10 bp, Artificial Sequence
  Synthetic Sequence
acattgcctt

SEQ ID NO: 5709 - DNA, 10 bp, Artificial Sequence
  Synthetic Sequence
gttagtggga

SEQ ID NO: 5710 - DNA, 10 bp, Artificial Sequence
  Synthetic Sequence
agtgtcgggt

SEQ ID NO: 5711 - DNA, 10 bp, Artificial Sequence
  Synthetic Sequence
gtcttacaga

SEQ ID NO: 5712 - DNA, 10 bp, Artificial Sequence
  Synthetic Sequence
acggatttgg

SEQ ID NO: 5713 - DNA, 10 bp, Artificial Sequence
  Synthetic Sequence
cagggtggag

SEQ ID NO: 5714 - DNA, 10 bp, Artificial Sequence
  Synthetic Sequence
aatacggtag

SEQ ID NO: 5715 - DNA, 10 bp, Artificial Sequence
  Synthetic Sequence
cagtcagcat

SEQ ID NO: 5716 - DNA, 10 bp, Artificial Sequence
  Synthetic Sequence
catggagacc

SEQ ID NO: 5717 - DNA, 10 bp, Artificial Sequence
  Synthetic Sequence
gtaccagcgg

SEQ ID NO: 5718 - DNA, 10 bp, Artificial Sequence
  Synthetic Sequence
tcgctacagc

SEQ ID NO: 5719 - DNA, 10 bp, Artificial Sequence
  Synthetic Sequence
cgtgtgcaaa

SEQ ID NO: 5720 - DNA, 10 bp, Artificial Sequence
  Synthetic Sequence
tgttgtgaac

SEQ ID NO: 5721 - DNA, 10 bp, Artificial Sequence
  Synthetic Sequence
ggaccctgga

SEQ ID NO: 5722 - DNA, 10 bp, Artificial Sequence
  Synthetic Sequence
catttgagta

SEQ ID NO: 5723 - DNA, 10 bp, Artificial Sequence
  Synthetic Sequence
cgtaattcac

SEQ ID NO: 5724 - DNA, 10 bp, Artificial Sequence
  Synthetic Sequence
cttcataact

SEQ ID NO: 5725 - DNA, 10 bp, Artificial Sequence
  Synthetic Sequence
cactcgctta

SEQ ID NO: 5726 - DNA, 10 bp, Artificial Sequence
  Synthetic Sequence
tcgggcccaa

SEQ ID NO: 5727 - DNA, 10 bp, Artificial Sequence
  Synthetic Sequence
gtcctgtcac

SEQ ID NO: 5728 - DNA, 10 bp, Artificial Sequence
  Synthetic Sequence
gagacgccga

SEQ ID NO: 5729 - DNA, 10 bp, Artificial Sequence
  Synthetic Sequence
atctaagatt

SEQ ID NO: 5730 - DNA, 10 bp, Artificial Sequence
  Synthetic Sequence
acctcattga

SEQ ID NO: 5731 - DNA, 10 bp, Artificial Sequence
  Synthetic Sequence
gagatgtgcg

SEQ ID NO: 5732 - DNA, 10 bp, Artificial Sequence
  Synthetic Sequence
cttatcttga

SEQ ID NO: 5733 - DNA, 10 bp, Artificial Sequence
  Synthetic Sequence
cgtagctgtt

SEQ ID NO: 5734 - DNA, 10 bp, Artificial Sequence
  Synthetic Sequence
agaaagcctt

SEQ ID NO: 5735 - DNA, 10 bp, Artificial Sequence
  Synthetic Sequence
gtcagccctc

SEQ ID NO: 5736 - DNA, 10 bp, Artificial Sequence
  Synthetic Sequence
cgatgagagt

SEQ ID NO: 5737 - DNA, 10 bp, Artificial Sequence
  Synthetic Sequence
gctcactgcc

SEQ ID NO: 5738 - DNA, 10 bp, Artificial Sequence
  Synthetic Sequence
ttcaggctta

SEQ ID NO: 5739 - DNA, 10 bp, Artificial Sequence
  Synthetic Sequence
tggcctttct

SEQ ID NO: 5740 - DNA, 10 bp, Artificial Sequence
  Synthetic Sequence
cttcggcacc

SEQ ID NO: 5741 - DNA, 10 bp, Artificial Sequence
  Synthetic Sequence
tactatcgta

SEQ ID NO: 5742 - DNA, 10 bp, Artificial Sequence
  Synthetic Sequence
tatagtctcc

SEQ ID NO: 5743 - DNA, 10 bp, Artificial Sequence
  Synthetic Sequence
cgcacctgtg

SEQ ID NO: 5744 - DNA, 10 bp, Artificial Sequence
  Synthetic Sequence
atcctaagta

SEQ ID NO: 5745 - DNA, 10 bp, Artificial Sequence
  Synthetic Sequence
aagtctgata

SEQ ID NO: 5746 - DNA, 10 bp, Artificial Sequence
  Synthetic Sequence
ccgttggaat

SEQ ID NO: 5747 - DNA, 10 bp, Artificial Sequence
  Synthetic Sequence
caaatataag

SEQ ID NO: 5748 - DNA, 10 bp, Artificial Sequence
  Synthetic Sequence
gccgtagttg

SEQ ID NO: 5749 - DNA, 10 bp, Artificial Sequence
  Synthetic Sequence
cccatgaagc

SEQ ID NO: 5750 - DNA, 10 bp, Artificial Sequence
  Synthetic Sequence
ggcgaactat

SEQ ID NO: 5751 - DNA, 10 bp, Artificial Sequence
  Synthetic Sequence
gtgaatatac

SEQ ID NO: 5752 - DNA, 10 bp, Artificial Sequence
  Synthetic Sequence
gagataccgt

SEQ ID NO: 5753 - DNA, 10 bp, Artificial Sequence
  Synthetic Sequence
tatgcctatc

SEQ ID NO: 5754 - DNA, 10 bp, Artificial Sequence
  Synthetic Sequence
ctgtgttaga

SEQ ID NO: 5755 - DNA, 10 bp, Artificial Sequence
  Synthetic Sequence
taaagaggtt

SEQ ID NO: 5756 - DNA, 10 bp, Artificial Sequence
  Synthetic Sequence
atgagtagtg

SEQ ID NO: 5757 - DNA, 10 bp, Artificial Sequence
  Synthetic Sequence
gagatcgtta

SEQ ID NO: 5758 - DNA, 10 bp, Artificial Sequence
  Synthetic Sequence
tgcgtcctgg

SEQ ID NO: 5759 - DNA, 10 bp, Artificial Sequence
  Synthetic Sequence
ggaaacgttc

SEQ ID NO: 5760 - DNA, 10 bp, Artificial Sequence
  Synthetic Sequence
tacttctcac

SEQ ID NO: 5761 - DNA, 10 bp, Artificial Sequence
  Synthetic Sequence
ctctccgcag

SEQ ID NO: 5762 - DNA, 10 bp, Artificial Sequence
  Synthetic Sequence
actaagcacg

SEQ ID NO: 5763 - DNA, 10 bp, Artificial Sequence
  Synthetic Sequence
aagctggtat

SEQ ID NO: 5764 - DNA, 10 bp, Artificial Sequence
  Synthetic Sequence
gggaggcttg

SEQ ID NO: 5765 - DNA, 10 bp, Artificial Sequence
  Synthetic Sequence
tggatccaag

SEQ ID NO: 5766 - DNA, 10 bp, Artificial Sequence
  Synthetic Sequence
cgttaaagag

SEQ ID NO: 5767 - DNA, 10 bp, Artificial Sequence
  Synthetic Sequence
atcacaccct

SEQ ID NO: 5768 - DNA, 10 bp, Artificial Sequence
  Synthetic Sequence
aatgcttaag

SEQ ID NO: 5769 - DNA, 10 bp, Artificial Sequence
  Synthetic Sequence
atggaaccag

SEQ ID NO: 5770 - DNA, 10 bp, Artificial Sequence
  Synthetic Sequence
gtgagcgaaa

SEQ ID NO: 5771 - DNA, 10 bp, Artificial Sequence
  Synthetic Sequence
tagtccctga

SEQ ID NO: 5772 - DNA, 10 bp, Artificial Sequence
  Synthetic Sequence
ctggtcaccc

SEQ ID NO: 5773 - DNA, 10 bp, Artificial Sequence
  Synthetic Sequence
acgaatttct

SEQ ID NO: 5774 - DNA, 10 bp, Artificial Sequence
  Synthetic Sequence
cgagtggaga

SEQ ID NO: 5775 - DNA, 10 bp, Artificial Sequence
  Synthetic Sequence
tcagtattag

SEQ ID NO: 5776 - DNA, 10 bp, Artificial Sequence
  Synthetic Sequence
gcaaatagga

SEQ ID NO: 5777 - DNA, 10 bp, Artificial Sequence
  Synthetic Sequence
ggcgttatgt

SEQ ID NO: 5778 - DNA, 10 bp, Artificial Sequence
  Synthetic Sequence
caccctcgtg

SEQ ID NO: 5779 - DNA, 10 bp, Artificial Sequence
  Synthetic Sequence
tttgactggc

SEQ ID NO: 5780 - DNA, 10 bp, Artificial Sequence
  Synthetic Sequence
ctgaaggcta

SEQ ID NO: 5781 - DNA, 10 bp, Artificial Sequence
  Synthetic Sequence
gtacaccacg

SEQ ID NO: 5782 - DNA, 10 bp, Artificial Sequence
  Synthetic Sequence
agtcccgcga

SEQ ID NO: 5783 - DNA, 10 bp, Artificial Sequence
  Synthetic Sequence
gatgacttgg

SEQ ID NO: 5784 - DNA, 10 bp, Artificial Sequence
  Synthetic Sequence
ttagtccgtt

SEQ ID NO: 5785 - DNA, 10 bp, Artificial Sequence
  Synthetic Sequence
aatgtgccgc

SEQ ID NO: 5786 - DNA, 10 bp, Artificial Sequence
  Synthetic Sequence
agtgtcgacg

SEQ ID NO: 5787 - DNA, 10 bp, Artificial Sequence
  Synthetic Sequence
aacgctggta

SEQ ID NO: 5788 - DNA, 10 bp, Artificial Sequence
  Synthetic Sequence
acatggcgga

SEQ ID NO: 5789 - DNA, 10 bp, Artificial Sequence
  Synthetic Sequence
ttagaatagc

SEQ ID NO: 5790 - DNA, 10 bp, Artificial Sequence
  Synthetic Sequence
gtcggactac

SEQ ID NO: 5791 - DNA, 10 bp, Artificial Sequence
  Synthetic Sequence
cgaggcttcg

SEQ ID NO: 5792 - DNA, 10 bp, Artificial Sequence
  Synthetic Sequence
ttagggcacg

SEQ ID NO: 5793 - DNA, 10 bp, Artificial Sequence
  Synthetic Sequence
ttcggccatg

SEQ ID NO: 5794 - DNA, 10 bp, Artificial Sequence
  Synthetic Sequence
ccgtagccct

SEQ ID NO: 5795 - DNA, 10 bp, Artificial Sequence
  Synthetic Sequence
aggtctaccc

SEQ ID NO: 5796 - DNA, 10 bp, Artificial Sequence
  Synthetic Sequence
ctgcagctgc

SEQ ID NO: 5797 - DNA, 10 bp, Artificial Sequence
  Synthetic Sequence
gtgcaatccg

SEQ ID NO: 5798 - DNA, 10 bp, Artificial Sequence
  Synthetic Sequence
attctggtgt

SEQ ID NO: 5799 - DNA, 10 bp, Artificial Sequence
  Synthetic Sequence
tactatctct

SEQ ID NO: 5800 - DNA, 10 bp, Artificial Sequence
  Synthetic Sequence
agagcctggg

SEQ ID NO: 5801 - DNA, 10 bp, Artificial Sequence
  Synthetic Sequence
tgtgtgttcg

SEQ ID NO: 5802 - DNA, 10 bp, Artificial Sequence
  Synthetic Sequence
gaagacctta

SEQ ID NO: 5803 - DNA, 10 bp, Artificial Sequence
  Synthetic Sequence
gtcaatcgtg

SEQ ID NO: 5804 - DNA, 10 bp, Artificial Sequence
  Synthetic Sequence
gtcccttggg

SEQ ID NO: 5805 - DNA, 10 bp, Artificial Sequence
  Synthetic Sequence
gccgcgtttc

SEQ ID NO: 5806 - DNA, 10 bp, Artificial Sequence
  Synthetic Sequence
aagcaaatgt

SEQ ID NO: 5807 - DNA, 10 bp, Artificial Sequence
  Synthetic Sequence
cggatgtgat

SEQ ID NO: 5808 - DNA, 10 bp, Artificial Sequence
  Synthetic Sequence
gcgccgttga

SEQ ID NO: 5809 - DNA, 10 bp, Artificial Sequence
  Synthetic Sequence
aggattgctt

SEQ ID NO: 5810 - DNA, 10 bp, Artificial Sequence
  Synthetic Sequence
atgccctctc

SEQ ID NO: 5811 - DNA, 10 bp, Artificial Sequence
  Synthetic Sequence
tacggcctca

SEQ ID NO: 5812 - DNA, 10 bp, Artificial Sequence
  Synthetic Sequence
gtttactgac

SEQ ID NO: 5813 - DNA, 10 bp, Artificial Sequence
  Synthetic Sequence
gcgtcctcat

SEQ ID NO: 5814 - DNA, 10 bp, Artificial Sequence
  Synthetic Sequence
agcactgtac

SEQ ID NO: 5815 - DNA, 10 bp, Artificial Sequence
  Synthetic Sequence
gtggacattg

SEQ ID NO: 5816 - DNA, 10 bp, Artificial Sequence
  Synthetic Sequence
tcgcttacaa

SEQ ID NO: 5817 - DNA, 10 bp, Artificial Sequence
  Synthetic Sequence
tcccaccgtg

SEQ ID NO: 5818 - DNA, 10 bp, Artificial Sequence
  Synthetic Sequence
aaggtgtcgt

SEQ ID NO: 5819 - DNA, 10 bp, Artificial Sequence
  Synthetic Sequence
gatcatgcga

SEQ ID NO: 5820 - DNA, 10 bp, Artificial Sequence
  Synthetic Sequence
cccagttctt

SEQ ID NO: 5821 - DNA, 10 bp, Artificial Sequence
  Synthetic Sequence
actcgctttc

SEQ ID NO: 5822 - DNA, 10 bp, Artificial Sequence
  Synthetic Sequence
ttcagtagcc

SEQ ID NO: 5823 - DNA, 10 bp, Artificial Sequence
  Synthetic Sequence
ggcctcgctt

SEQ ID NO: 5824 - DNA, 10 bp, Artificial Sequence
  Synthetic Sequence
gacggagact

SEQ ID NO: 5825 - DNA, 10 bp, Artificial Sequence
  Synthetic Sequence
cccacactgc

SEQ ID NO: 5826 - DNA, 10 bp, Artificial Sequence
  Synthetic Sequence
aacactgctt

SEQ ID NO: 5827 - DNA, 10 bp, Artificial Sequence
  Synthetic Sequence
actacgcatc

SEQ ID NO: 5828 - DNA, 10 bp, Artificial Sequence
  Synthetic Sequence
tcgttcagaa

SEQ ID NO: 5829 - DNA, 10 bp, Artificial Sequence
  Synthetic Sequence
tcaattcccg

SEQ ID NO: 5830 - DNA, 10 bp, Artificial Sequence
  Synthetic Sequence
agttgtctgc

SEQ ID NO: 5831 - DNA, 10 bp, Artificial Sequence
  Synthetic Sequence
ggtacgccgt

SEQ ID NO: 5832 - DNA, 10 bp, Artificial Sequence
  Synthetic Sequence
tgcattgatt

SEQ ID NO: 5833 - DNA, 10 bp, Artificial Sequence
  Synthetic Sequence
cgtgggtaga

SEQ ID NO: 5834 - DNA, 10 bp, Artificial Sequence
  Synthetic Sequence
attagcgtgg

SEQ ID NO: 5835 - DNA, 10 bp, Artificial Sequence
  Synthetic Sequence
tctccaggcc

SEQ ID NO: 5836 - DNA, 10 bp, Artificial Sequence
  Synthetic Sequence
gagttaaatc

SEQ ID NO: 5837 - DNA, 10 bp, Artificial Sequence
  Synthetic Sequence
gacgagttac

SEQ ID NO: 5838 - DNA, 10 bp, Artificial Sequence
  Synthetic Sequence
tccctttagt

SEQ ID NO: 5839 - DNA, 10 bp, Artificial Sequence
  Synthetic Sequence
ctacgactgt

SEQ ID NO: 5840 - DNA, 10 bp, Artificial Sequence
  Synthetic Sequence
taacgtcctg

SEQ ID NO: 5841 - DNA, 10 bp, Artificial Sequence
  Synthetic Sequence
gaacgccgct

SEQ ID NO: 5842 - DNA, 10 bp, Artificial Sequence
  Synthetic Sequence
tcccaacaca

SEQ ID NO: 5843 - DNA, 10 bp, Artificial Sequence
  Synthetic Sequence
catgggccat

SEQ ID NO: 5844 - DNA, 10 bp, Artificial Sequence
  Synthetic Sequence
aagcattagt

SEQ ID NO: 5845 - DNA, 10 bp, Artificial Sequence
  Synthetic Sequence
caattgtatg

SEQ ID NO: 5846 - DNA, 10 bp, Artificial Sequence
  Synthetic Sequence
accacagaaa

SEQ ID NO: 5847 - DNA, 10 bp, Artificial Sequence
  Synthetic Sequence
ggaccatgtc

SEQ ID NO: 5848 - DNA, 10 bp, Artificial Sequence
  Synthetic Sequence
gagcagaaga

SEQ ID NO: 5849 - DNA, 10 bp, Artificial Sequence
  Synthetic Sequence
ccctcatggg

SEQ ID NO: 5850 - DNA, 10 bp, Artificial Sequence
  Synthetic Sequence
atgcgatccc

SEQ ID NO: 5851 - DNA, 10 bp, Artificial Sequence
  Synthetic Sequence
gagctgcact

SEQ ID NO: 5852 - DNA, 10 bp, Artificial Sequence
  Synthetic Sequence
ccgattccac

SEQ ID NO: 5853 - DNA, 10 bp, Artificial Sequence
  Synthetic Sequence
cggcgtacta

SEQ ID NO: 5854 - DNA, 10 bp, Artificial Sequence
  Synthetic Sequence
ggtgacccgt

SEQ ID NO: 5855 - DNA, 10 bp, Artificial Sequence
  Synthetic Sequence
tggctgaggt

SEQ ID NO: 5856 - DNA, 10 bp, Artificial Sequence
  Synthetic Sequence
gtattaaatg

SEQ ID NO: 5857 - DNA, 10 bp, Artificial Sequence
  Synthetic Sequence
tgacattggt

SEQ ID NO: 5858 - DNA, 10 bp, Artificial Sequence
  Synthetic Sequence
agagtttaga

SEQ ID NO: 5859 - DNA, 10 bp, Artificial Sequence
  Synthetic Sequence
tatgtactgt

SEQ ID NO: 5860 - DNA, 10 bp, Artificial Sequence
  Synthetic Sequence
ttagacgtgt

SEQ ID NO: 5861 - DNA, 10 bp, Artificial Sequence
  Synthetic Sequence
caacggcatc

SEQ ID NO: 5862 - DNA, 10 bp, Artificial Sequence
  Synthetic Sequence
caatcgtgag

SEQ ID NO: 5863 - DNA, 10 bp, Artificial Sequence
  Synthetic Sequence
taaagcctct

SEQ ID NO: 5864 - DNA, 10 bp, Artificial Sequence
  Synthetic Sequence
ctaaatagta

SEQ ID NO: 5865 - DNA, 10 bp, Artificial Sequence
  Synthetic Sequence
agtttcgcct

SEQ ID NO: 5866 - DNA, 10 bp, Artificial Sequence
  Synthetic Sequence
cgttgtgtgg

SEQ ID NO: 5867 - DNA, 10 bp, Artificial Sequence
  Synthetic Sequence
cgttcgacgc

SEQ ID NO: 5868 - DNA, 10 bp, Artificial Sequence
  Synthetic Sequence
accgaaggtg

SEQ ID NO: 5869 - DNA, 10 bp, Artificial Sequence
  Synthetic Sequence
gccgaactgg

SEQ ID NO: 5870 - DNA, 10 bp, Artificial Sequence
  Synthetic Sequence
taaaggatta

SEQ ID NO: 5871 - DNA, 10 bp, Artificial Sequence
  Synthetic Sequence
acgtccatcc

SEQ ID NO: 5872 - DNA, 10 bp, Artificial Sequence
  Synthetic Sequence
atgttacgtg

SEQ ID NO: 5873 - DNA, 10 bp, Artificial Sequence
  Synthetic Sequence
gcgtacattt

SEQ ID NO: 5874 - DNA, 10 bp, Artificial Sequence
  Synthetic Sequence
ttcgtacttt

SEQ ID NO: 5875 - DNA, 10 bp, Artificial Sequence
  Synthetic Sequence
aactagctag

SEQ ID NO: 5876 - DNA, 10 bp, Artificial Sequence
  Synthetic Sequence
tcaagggaac

SEQ ID NO: 5877 - DNA, 10 bp, Artificial Sequence
  Synthetic Sequence
gcttacgcgc

SEQ ID NO: 5878 - DNA, 10 bp, Artificial Sequence
  Synthetic Sequence
ctcaatgacc

SEQ ID NO: 5879 - DNA, 10 bp, Artificial Sequence
  Synthetic Sequence
agactcttca

SEQ ID NO: 5880 - DNA, 10 bp, Artificial Sequence
  Synthetic Sequence
taattgtgtc

SEQ ID NO: 5881 - DNA, 10 bp, Artificial Sequence
  Synthetic Sequence
aacagatgca

SEQ ID NO: 5882 - DNA, 10 bp, Artificial Sequence
  Synthetic Sequence
aatgcaacta

SEQ ID NO: 5883 - DNA, 10 bp, Artificial Sequence
  Synthetic Sequence
cgtgcgaata

SEQ ID NO: 5884 - DNA, 10 bp, Artificial Sequence
  Synthetic Sequence
ataaccacac

SEQ ID NO: 5885 - DNA, 10 bp, Artificial Sequence
  Synthetic Sequence
tatgaaattt

SEQ ID NO: 5886 - DNA, 10 bp, Artificial Sequence
  Synthetic Sequence
cttacccgag

SEQ ID NO: 5887 - DNA, 10 bp, Artificial Sequence
  Synthetic Sequence
agtcgcaggc

SEQ ID NO: 5888 - DNA, 10 bp, Artificial Sequence
  Synthetic Sequence
gctcaataag

SEQ ID NO: 5889 - DNA, 10 bp, Artificial Sequence
  Synthetic Sequence
gttgcctcgg

SEQ ID NO: 5890 - DNA, 10 bp, Artificial Sequence
  Synthetic Sequence
tggccctgta

SEQ ID NO: 5891 - DNA, 10 bp, Artificial Sequence
  Synthetic Sequence
caagcgatac

SEQ ID NO: 5892 - DNA, 10 bp, Artificial Sequence
  Synthetic Sequence
ccgcatttat

SEQ ID NO: 5893 - DNA, 10 bp, Artificial Sequence
  Synthetic Sequence
tttactatac

SEQ ID NO: 5894 - DNA, 10 bp, Artificial Sequence
  Synthetic Sequence
acccatgtca

SEQ ID NO: 5895 - DNA, 10 bp, Artificial Sequence
  Synthetic Sequence
gtgctaggcg

SEQ ID NO: 5896 - DNA, 10 bp, Artificial Sequence
  Synthetic Sequence
tcgcgggaga

SEQ ID NO: 5897 - DNA, 10 bp, Artificial Sequence
  Synthetic Sequence
cctacgcgtt

SEQ ID NO: 5898 - DNA, 10 bp, Artificial Sequence
  Synthetic Sequence
agtaactcgt

SEQ ID NO: 5899 - DNA, 10 bp, Artificial Sequence
  Synthetic Sequence
gttggaacct

SEQ ID NO: 5900 - DNA, 10 bp, Artificial Sequence
  Synthetic Sequence
ttattagtgg

SEQ ID NO: 5901 - DNA, 10 bp, Artificial Sequence
  Synthetic Sequence
agagcacctt

SEQ ID NO: 5902 - DNA, 10 bp, Artificial Sequence
  Synthetic Sequence
caaccatctc

SEQ ID NO: 5903 - DNA, 10 bp, Artificial Sequence
  Synthetic Sequence
acctacttcg

SEQ ID NO: 5904 - DNA, 10 bp, Artificial Sequence
  Synthetic Sequence
tcacatgggc

SEQ ID NO: 5905 - DNA, 10 bp, Artificial Sequence
  Synthetic Sequence
cgtgcattct

SEQ ID NO: 5906 - DNA, 10 bp, Artificial Sequence
  Synthetic Sequence
aatataatag

SEQ ID NO: 5907 - DNA, 10 bp, Artificial Sequence
  Synthetic Sequence
gacgaggatt

SEQ ID NO: 5908 - DNA, 10 bp, Artificial Sequence
  Synthetic Sequence
acactataat

SEQ ID NO: 5909 - DNA, 10 bp, Artificial Sequence
  Synthetic Sequence
catttgtagt

SEQ ID NO: 5910 - DNA, 10 bp, Artificial Sequence
  Synthetic Sequence
atactttgtt

SEQ ID NO: 5911 - DNA, 10 bp, Artificial Sequence
  Synthetic Sequence
tggctgatac

SEQ ID NO: 5912 - DNA, 10 bp, Artificial Sequence
  Synthetic Sequence
accggcatac

SEQ ID NO: 5913 - DNA, 10 bp, Artificial Sequence
  Synthetic Sequence
cggagaatac

SEQ ID NO: 5914 - DNA, 10 bp, Artificial Sequence
  Synthetic Sequence
atcgtgtact

SEQ ID NO: 5915 - DNA, 10 bp, Artificial Sequence
  Synthetic Sequence
cgattaatcc

SEQ ID NO: 5916 - DNA, 10 bp, Artificial Sequence
  Synthetic Sequence
cagtaggtgc

SEQ ID NO: 5917 - DNA, 10 bp, Artificial Sequence
  Synthetic Sequence
ctactcgcgt

SEQ ID NO: 5918 - DNA, 10 bp, Artificial Sequence
  Synthetic Sequence
acttctatag

SEQ ID NO: 5919 - DNA, 10 bp, Artificial Sequence
  Synthetic Sequence
gcgaggacgt

SEQ ID NO: 5920 - DNA, 10 bp, Artificial Sequence
  Synthetic Sequence
agtgacgcca

SEQ ID NO: 5921 - DNA, 10 bp, Artificial Sequence
  Synthetic Sequence
ctcgtatggg

SEQ ID NO: 5922 - DNA, 10 bp, Artificial Sequence
  Synthetic Sequence
tagttgcggg

SEQ ID NO: 5923 - DNA, 10 bp, Artificial Sequence
  Synthetic Sequence
caccgggtga

SEQ ID NO: 5924 - DNA, 10 bp, Artificial Sequence
  Synthetic Sequence
atttcgcggg

SEQ ID NO: 5925 - DNA, 10 bp, Artificial Sequence
  Synthetic Sequence
tatagcggta

SEQ ID NO: 5926 - DNA, 10 bp, Artificial Sequence
  Synthetic Sequence
agcagcggtg

SEQ ID NO: 5927 - DNA, 10 bp, Artificial Sequence
  Synthetic Sequence
atactgcggg

SEQ ID NO: 5928 - DNA, 10 bp, Artificial Sequence
  Synthetic Sequence
tagtacgcta

SEQ ID NO: 5929 - DNA, 10 bp, Artificial Sequence
  Synthetic Sequence
atggttcgac

SEQ ID NO: 5930 - DNA, 10 bp, Artificial Sequence
  Synthetic Sequence
ccgtagctag

SEQ ID NO: 5931 - DNA, 10 bp, Artificial Sequence
  Synthetic Sequence
gtatcgacga

SEQ ID NO: 5932 - DNA, 10 bp, Artificial Sequence
  Synthetic Sequence
cgttggcggt

SEQ ID NO: 5933 - DNA, 10 bp, Artificial Sequence
  Synthetic Sequence
cgaaccaacg

SEQ ID NO: 5934 - DNA, 10 bp, Artificial Sequence
  Synthetic Sequence
cgcaaatata

SEQ ID NO: 5935 - DNA, 10 bp, Artificial Sequence
  Synthetic Sequence
agaacggtta

SEQ ID NO: 5936 - DNA, 10 bp, Artificial Sequence
  Synthetic Sequence
ggatcttcgt

SEQ ID NO: 5937 - DNA, 10 bp, Artificial Sequence
  Synthetic Sequence
caagatttcc

SEQ ID NO: 5938 - DNA, 10 bp, Artificial Sequence
  Synthetic Sequence
tttatcaacc

SEQ ID NO: 5939 - DNA, 10 bp, Artificial Sequence
  Synthetic Sequence
aatcttagtc

SEQ ID NO: 5940 - DNA, 10 bp, Artificial Sequence
  Synthetic Sequence
tccgttccat

SEQ ID NO: 5941 - DNA, 10 bp, Artificial Sequence
  Synthetic Sequence
agaacttcga

SEQ ID NO: 5942 - DNA, 10 bp, Artificial Sequence
  Synthetic Sequence
gagtctaacg

SEQ ID NO: 5943 - DNA, 10 bp, Artificial Sequence
  Synthetic Sequence
aagcacaata

SEQ ID NO: 5944 - DNA, 10 bp, Artificial Sequence
  Synthetic Sequence
cacgtctcct

SEQ ID NO: 5945 - DNA, 10 bp, Artificial Sequence
  Synthetic Sequence
caggtttgcc

SEQ ID NO: 5946 - DNA, 10 bp, Artificial Sequence
  Synthetic Sequence
attgttcccg

SEQ ID NO: 5947 - DNA, 10 bp, Artificial Sequence
  Synthetic Sequence
gggcctggat

SEQ ID NO: 5948 - DNA, 10 bp, Artificial Sequence
  Synthetic Sequence
attgcccgta

SEQ ID NO: 5949 - DNA, 10 bp, Artificial Sequence
  Synthetic Sequence
ttatcctctt

SEQ ID NO: 5950 - DNA, 10 bp, Artificial Sequence
  Synthetic Sequence
ggtaattgca

SEQ ID NO: 5951 - DNA, 10 bp, Artificial Sequence
  Synthetic Sequence
ccagctcggt

SEQ ID NO: 5952 - DNA, 10 bp, Artificial Sequence
  Synthetic Sequence
tattccatcc

SEQ ID NO: 5953 - DNA, 10 bp, Artificial Sequence
  Synthetic Sequence
aggccgatgg

SEQ ID NO: 5954 - DNA, 10 bp, Artificial Sequence
  Synthetic Sequence
aacaagccaa

SEQ ID NO: 5955 - DNA, 10 bp, Artificial Sequence
  Synthetic Sequence
tggttcaggg

SEQ ID NO: 5956 - DNA, 10 bp, Artificial Sequence
  Synthetic Sequence
gcccgctata

SEQ ID NO: 5957 - DNA, 10 bp, Artificial Sequence
  Synthetic Sequence
aatcgcatca

SEQ ID NO: 5958 - DNA, 10 bp, Artificial Sequence
  Synthetic Sequence
cgccattaaa

SEQ ID NO: 5959 - DNA, 10 bp, Artificial Sequence
  Synthetic Sequence
agtatttacc

SEQ ID NO: 5960 - DNA, 10 bp, Artificial Sequence
  Synthetic Sequence
ctaacaaata

SEQ ID NO: 5961 - DNA, 10 bp, Artificial Sequence
  Synthetic Sequence
tctgatatga

SEQ ID NO: 5962 - DNA, 10 bp, Artificial Sequence
  Synthetic Sequence
acgtctgtat

SEQ ID NO: 5963 - DNA, 10 bp, Artificial Sequence
  Synthetic Sequence
ctgtaactaa

SEQ ID NO: 5964 - DNA, 10 bp, Artificial Sequence
  Synthetic Sequence
gccaaaccta

SEQ ID NO: 5965 - DNA, 10 bp, Artificial Sequence
  Synthetic Sequence
ggctcttgtg

SEQ ID NO: 5966 - DNA, 10 bp, Artificial Sequence
  Synthetic Sequence
ggcgcctagt

SEQ ID NO: 5967 - DNA, 10 bp, Artificial Sequence
  Synthetic Sequence
ttagagcgtc

SEQ ID NO: 5968 - DNA, 10 bp, Artificial Sequence
  Synthetic Sequence
attacttcct

SEQ ID NO: 5969 - DNA, 10 bp, Artificial Sequence
  Synthetic Sequence
gacacaaggt

SEQ ID NO: 5970 - DNA, 10 bp, Artificial Sequence
  Synthetic Sequence
gacgaaactg

SEQ ID NO: 5971 - DNA, 10 bp, Artificial Sequence
  Synthetic Sequence
tcggtggcat

SEQ ID NO: 5972 - DNA, 10 bp, Artificial Sequence
  Synthetic Sequence
atattcctcg

SEQ ID NO: 5973 - DNA, 10 bp, Artificial Sequence
  Synthetic Sequence
gtgacagtac

SEQ ID NO: 5974 - DNA, 10 bp, Artificial Sequence
  Synthetic Sequence
tttcgcctac

SEQ ID NO: 5975 - DNA, 10 bp, Artificial Sequence
  Synthetic Sequence
tattagatgt

SEQ ID NO: 5976 - DNA, 10 bp, Artificial Sequence
  Synthetic Sequence
catcagacca

SEQ ID NO: 5977 - DNA, 10 bp, Artificial Sequence
  Synthetic Sequence
cctcgatata

SEQ ID NO: 5978 - DNA, 10 bp, Artificial Sequence
  Synthetic Sequence
aggtgacctc

SEQ ID NO: 5979 - DNA, 10 bp, Artificial Sequence
  Synthetic Sequence
tccattacga

SEQ ID NO: 5980 - DNA, 10 bp, Artificial Sequence
  Synthetic Sequence
tcgttcggcg

SEQ ID NO: 5981 - DNA, 10 bp, Artificial Sequence
  Synthetic Sequence
ataactttcg

SEQ ID NO: 5982 - DNA, 10 bp, Artificial Sequence
  Synthetic Sequence
cttgcatgga

SEQ ID NO: 5983 - DNA, 10 bp, Artificial Sequence
  Synthetic Sequence
tcagtttccc

SEQ ID NO: 5984 - DNA, 10 bp, Artificial Sequence
  Synthetic Sequence
tcggcgctgt

SEQ ID NO: 5985 - DNA, 10 bp, Artificial Sequence
  Synthetic Sequence
ccgcttcagg

SEQ ID NO: 5986 - DNA, 10 bp, Artificial Sequence
  Synthetic Sequence
gaaggtggac

SEQ ID NO: 5987 - DNA, 10 bp, Artificial Sequence
  Synthetic Sequence
gaacccgcta

SEQ ID NO: 5988 - DNA, 10 bp, Artificial Sequence
  Synthetic Sequence
tactttcctc

SEQ ID NO: 5989 - DNA, 10 bp, Artificial Sequence
  Synthetic Sequence
gcctgtaaat

SEQ ID NO: 5990 - DNA, 10 bp, Artificial Sequence
  Synthetic Sequence
cctgccaggt

SEQ ID NO: 5991 - DNA, 10 bp, Artificial Sequence
  Synthetic Sequence
taagttctct

SEQ ID NO: 5992 - DNA, 10 bp, Artificial Sequence
  Synthetic Sequence
aagcgcctaa

SEQ ID NO: 5993 - DNA, 10 bp, Artificial Sequence
  Synthetic Sequence
tttcggttta

SEQ ID NO: 5994 - DNA, 10 bp, Artificial Sequence
  Synthetic Sequence
tatggtcagc

SEQ ID NO: 5995 - DNA, 10 bp, Artificial Sequence
  Synthetic Sequence
agctttacgt

SEQ ID NO: 5996 - DNA, 10 bp, Artificial Sequence
  Synthetic Sequence
ttgtaccgaa

SEQ ID NO: 5997 - DNA, 10 bp, Artificial Sequence
  Synthetic Sequence
acaacatttc

SEQ ID NO: 5998 - DNA, 10 bp, Artificial Sequence
  Synthetic Sequence
gtagaatctg

SEQ ID NO: 5999 - DNA, 10 bp, Artificial Sequence
  Synthetic Sequence
agaatcgcat

SEQ ID NO: 6000 - DNA, 10 bp, Artificial Sequence
  Synthetic Sequence
ttgttgaccc

SEQ ID NO: 6001 - DNA, 10 bp, Artificial Sequence
  Synthetic Sequence
gtgtgcataa

SEQ ID NO: 6002 - DNA, 10 bp, Artificial Sequence
  Synthetic Sequence
acggattaac

SEQ ID NO: 6003 - DNA, 10 bp, Artificial Sequence
  Synthetic Sequence
gtgattcgcg

SEQ ID NO: 6004 - DNA, 10 bp, Artificial Sequence
  Synthetic Sequence
tagctcacct

SEQ ID NO: 6005 - DNA, 10 bp, Artificial Sequence
  Synthetic Sequence
cacaataaag

SEQ ID NO: 6006 - DNA, 10 bp, Artificial Sequence
  Synthetic Sequence
gatcttcaat

SEQ ID NO: 6007 - DNA, 10 bp, Artificial Sequence
  Synthetic Sequence
gccaataacg

SEQ ID NO: 6008 - DNA, 10 bp, Artificial Sequence
  Synthetic Sequence
tttaccatct

SEQ ID NO: 6009 - DNA, 10 bp, Artificial Sequence
  Synthetic Sequence
tcgattaggg

SEQ ID NO: 6010 - DNA, 10 bp, Artificial Sequence
  Synthetic Sequence
gtgacggcgt

SEQ ID NO: 6011 - DNA, 10 bp, Artificial Sequence
  Synthetic Sequence
ttacccgtcg

SEQ ID NO: 6012 - DNA, 10 bp, Artificial Sequence
  Synthetic Sequence
ggttcccgtc

SEQ ID NO: 6013 - DNA, 10 bp, Artificial Sequence
  Synthetic Sequence
atgtcgtgtc

SEQ ID NO: 6014 - DNA, 10 bp, Artificial Sequence
  Synthetic Sequence
ccctacctgc

SEQ ID NO: 6015 - DNA, 10 bp, Artificial Sequence
  Synthetic Sequence
tctagaacct

SEQ ID NO: 6016 - DNA, 10 bp, Artificial Sequence
  Synthetic Sequence
gggccacgtt

SEQ ID NO: 6017 - DNA, 10 bp, Artificial Sequence
  Synthetic Sequence
cagaatcaaa

SEQ ID NO: 6018 - DNA, 10 bp, Artificial Sequence
  Synthetic Sequence
gggctggaat

SEQ ID NO: 6019 - DNA, 10 bp, Artificial Sequence
  Synthetic Sequence
atgattcaat

SEQ ID NO: 6020 - DNA, 10 bp, Artificial Sequence
  Synthetic Sequence
agatactgtt

SEQ ID NO: 6021 - DNA, 10 bp, Artificial Sequence
  Synthetic Sequence
agggcagtcc

SEQ ID NO: 6022 - DNA, 10 bp, Artificial Sequence
  Synthetic Sequence
aggactttgc

SEQ ID NO: 6023 - DNA, 10 bp, Artificial Sequence
  Synthetic Sequence
atcagcccgt

SEQ ID NO: 6024 - DNA, 10 bp, Artificial Sequence
  Synthetic Sequence
tatggcacca

SEQ ID NO: 6025 - DNA, 10 bp, Artificial Sequence
  Synthetic Sequence
gtgtaacgag

SEQ ID NO: 6026 - DNA, 10 bp, Artificial Sequence
  Synthetic Sequence
gtgagcccat

SEQ ID NO: 6027 - DNA, 10 bp, Artificial Sequence
  Synthetic Sequence
ttctcgtagc

SEQ ID NO: 6028 - DNA, 10 bp, Artificial Sequence
  Synthetic Sequence
ttatagggtt

SEQ ID NO: 6029 - DNA, 10 bp, Artificial Sequence
  Synthetic Sequence
atagaaccta

SEQ ID NO: 6030 - DNA, 10 bp, Artificial Sequence
  Synthetic Sequence
cagacaccgg

SEQ ID NO: 6031 - DNA, 10 bp, Artificial Sequence
  Synthetic Sequence
tgtaaccctc

SEQ ID NO: 6032 - DNA, 10 bp, Artificial Sequence
  Synthetic Sequence
ttcccgcgac

SEQ ID NO: 6033 - DNA, 10 bp, Artificial Sequence
  Synthetic Sequence
ccgccatggt

SEQ ID NO: 6034 - DNA, 10 bp, Artificial Sequence
  Synthetic Sequence
aagctgcagg

SEQ ID NO: 6035 - DNA, 10 bp, Artificial Sequence
  Synthetic Sequence
cgaatgcgag

SEQ ID NO: 6036 - DNA, 10 bp, Artificial Sequence
  Synthetic Sequence
tgactccctt

SEQ ID NO: 6037 - DNA, 10 bp, Artificial Sequence
  Synthetic Sequence
tgccaggaag

SEQ ID NO: 6038 - DNA, 10 bp, Artificial Sequence
  Synthetic Sequence
catctggata

SEQ ID NO: 6039 - DNA, 10 bp, Artificial Sequence
  Synthetic Sequence
gtatttcgat

SEQ ID NO: 6040 - DNA, 10 bp, Artificial Sequence
  Synthetic Sequence
tggtcatcgt

SEQ ID NO: 6041 - DNA, 10 bp, Artificial Sequence
  Synthetic Sequence
tggtagactg

SEQ ID NO: 6042 - DNA, 10 bp, Artificial Sequence
  Synthetic Sequence
acgcacatgg

SEQ ID NO: 6043 - DNA, 10 bp, Artificial Sequence
  Synthetic Sequence
gacggctcca

SEQ ID NO: 6044 - DNA, 10 bp, Artificial Sequence
  Synthetic Sequence
gctaagggtg

SEQ ID NO: 6045 - DNA, 10 bp, Artificial Sequence
  Synthetic Sequence
accaatagtg

SEQ ID NO: 6046 - DNA, 10 bp, Artificial Sequence
  Synthetic Sequence
aactcgcagt

SEQ ID NO: 6047 - DNA, 10 bp, Artificial Sequence
  Synthetic Sequence
ctaaacaaga

SEQ ID NO: 6048 - DNA, 10 bp, Artificial Sequence
  Synthetic Sequence
acaaaccatt

SEQ ID NO: 6049 - DNA, 10 bp, Artificial Sequence
  Synthetic Sequence
ttactttact

SEQ ID NO: 6050 - DNA, 10 bp, Artificial Sequence
  Synthetic Sequence
ctaagacaaa

SEQ ID NO: 6051 - DNA, 10 bp, Artificial Sequence
  Synthetic Sequence
cgtttctcgg

SEQ ID NO: 6052 - DNA, 10 bp, Artificial Sequence
  Synthetic Sequence
gcaggcatgc

SEQ ID NO: 6053 - DNA, 10 bp, Artificial Sequence
  Synthetic Sequence
cgtttgggtc

SEQ ID NO: 6054 - DNA, 10 bp, Artificial Sequence
  Synthetic Sequence
ctcttgtcga

SEQ ID NO: 6055 - DNA, 10 bp, Artificial Sequence
  Synthetic Sequence
agcggcgtga

SEQ ID NO: 6056 - DNA, 10 bp, Artificial Sequence
  Synthetic Sequence
ctccggcttg

SEQ ID NO: 6057 - DNA, 10 bp, Artificial Sequence
  Synthetic Sequence
acttgtatcc

SEQ ID NO: 6058 - DNA, 10 bp, Artificial Sequence
  Synthetic Sequence
acgccgcaaa

SEQ ID NO: 6059 - DNA, 10 bp, Artificial Sequence
  Synthetic Sequence
gtagtctcaa

SEQ ID NO: 6060 - DNA, 10 bp, Artificial Sequence
  Synthetic Sequence
agtgtatggg

SEQ ID NO: 6061 - DNA, 10 bp, Artificial Sequence
  Synthetic Sequence
ccagcagtct

SEQ ID NO: 6062 - DNA, 10 bp, Artificial Sequence
  Synthetic Sequence
cgtcctatct

SEQ ID NO: 6063 - DNA, 10 bp, Artificial Sequence
  Synthetic Sequence
accatctgca

SEQ ID NO: 6064 - DNA, 10 bp, Artificial Sequence
  Synthetic Sequence
caccgctcag

SEQ ID NO: 6065 - DNA, 10 bp, Artificial Sequence
  Synthetic Sequence
ctatcgcaac

SEQ ID NO: 6066 - DNA, 10 bp, Artificial Sequence
  Synthetic Sequence
ccgtgagagg

SEQ ID NO: 6067 - DNA, 10 bp, Artificial Sequence
  Synthetic Sequence
aggcactctg

SEQ ID NO: 6068 - DNA, 10 bp, Artificial Sequence
  Synthetic Sequence
cttgtaccca

SEQ ID NO: 6069 - DNA, 10 bp, Artificial Sequence
  Synthetic Sequence
tttcactgtt

SEQ ID NO: 6070 - DNA, 10 bp, Artificial Sequence
  Synthetic Sequence
tgtacagatc

SEQ ID NO: 6071 - DNA, 10 bp, Artificial Sequence
  Synthetic Sequence
gatcccggct

SEQ ID NO: 6072 - DNA, 10 bp, Artificial Sequence
  Synthetic Sequence
taccgccaaa

SEQ ID NO: 6073 - DNA, 10 bp, Artificial Sequence
  Synthetic Sequence
gagatccagc

SEQ ID NO: 6074 - DNA, 10 bp, Artificial Sequence
  Synthetic Sequence
cagacgttgg

SEQ ID NO: 6075 - DNA, 10 bp, Artificial Sequence
  Synthetic Sequence
ctgatctcct

SEQ ID NO: 6076 - DNA, 10 bp, Artificial Sequence
  Synthetic Sequence
agaagttctt

SEQ ID NO: 6077 - DNA, 10 bp, Artificial Sequence
  Synthetic Sequence
gcccaggtct

SEQ ID NO: 6078 - DNA, 10 bp, Artificial Sequence
  Synthetic Sequence
acagggtcgc

SEQ ID NO: 6079 - DNA, 10 bp, Artificial Sequence
  Synthetic Sequence
gacagcgctt

SEQ ID NO: 6080 - DNA, 10 bp, Artificial Sequence
  Synthetic Sequence
cggtcatgaa

SEQ ID NO: 6081 - DNA, 10 bp, Artificial Sequence
  Synthetic Sequence
taaatgacca

SEQ ID NO: 6082 - DNA, 10 bp, Artificial Sequence
  Synthetic Sequence
actacatgag

SEQ ID NO: 6083 - DNA, 10 bp, Artificial Sequence
  Synthetic Sequence
cgtggtttat

SEQ ID NO: 6084 - DNA, 10 bp, Artificial Sequence
  Synthetic Sequence
acctacgggc

SEQ ID NO: 6085 - DNA, 10 bp, Artificial Sequence
  Synthetic Sequence
acaagaatcg

SEQ ID NO: 6086 - DNA, 10 bp, Artificial Sequence
  Synthetic Sequence
tatgtgagga

SEQ ID NO: 6087 - DNA, 10 bp, Artificial Sequence
  Synthetic Sequence
gaattacgga

SEQ ID NO: 6088 - DNA, 10 bp, Artificial Sequence
  Synthetic Sequence
cacccggcta

SEQ ID NO: 6089 - DNA, 10 bp, Artificial Sequence
  Synthetic Sequence
gcaattataa

SEQ ID NO: 6090 - DNA, 10 bp, Artificial Sequence
  Synthetic Sequence
ttgggtccta

SEQ ID NO: 6091 - DNA, 10 bp, Artificial Sequence
  Synthetic Sequence
gacaagtata

SEQ ID NO: 6092 - DNA, 10 bp, Artificial Sequence
  Synthetic Sequence
ggcaaaggtg

SEQ ID NO: 6093 - DNA, 10 bp, Artificial Sequence
  Synthetic Sequence
tatgtgcgtt

SEQ ID NO: 6094 - DNA, 10 bp, Artificial Sequence
  Synthetic Sequence
ttgggtaccc

SEQ ID NO: 6095 - DNA, 10 bp, Artificial Sequence
  Synthetic Sequence
ggttgggttc

SEQ ID NO: 6096 - DNA, 10 bp, Artificial Sequence
  Synthetic Sequence
gatttattgg

SEQ ID NO: 6097 - DNA, 10 bp, Artificial Sequence
  Synthetic Sequence
gttcgaacgg

SEQ ID NO: 6098 - DNA, 10 bp, Artificial Sequence
  Synthetic Sequence
ttatcgtgta

SEQ ID NO: 6099 - DNA, 10 bp, Artificial Sequence
  Synthetic Sequence
gggaagggtt

SEQ ID NO: 6100 - DNA, 10 bp, Artificial Sequence
  Synthetic Sequence
tataaaccac

SEQ ID NO: 6101 - DNA, 10 bp, Artificial Sequence
  Synthetic Sequence
cgagccaatt

SEQ ID NO: 6102 - DNA, 10 bp, Artificial Sequence
  Synthetic Sequence
acccggcaac

SEQ ID NO: 6103 - DNA, 10 bp, Artificial Sequence
  Synthetic Sequence
agcgtcctct

SEQ ID NO: 6104 - DNA, 10 bp, Artificial Sequence
  Synthetic Sequence
cccgatcgca

SEQ ID NO: 6105 - DNA, 10 bp, Artificial Sequence
  Synthetic Sequence
ggctttcacg

SEQ ID NO: 6106 - DNA, 10 bp, Artificial Sequence
  Synthetic Sequence
cttattacat

SEQ ID NO: 6107 - DNA, 10 bp, Artificial Sequence
  Synthetic Sequence
ttccagtttc

SEQ ID NO: 6108 - DNA, 10 bp, Artificial Sequence
  Synthetic Sequence
gtctgctgag

SEQ ID NO: 6109 - DNA, 10 bp, Artificial Sequence
  Synthetic Sequence
atgtgtactc

SEQ ID NO: 6110 - DNA, 10 bp, Artificial Sequence
  Synthetic Sequence
cgactaaagg

SEQ ID NO: 6111 - DNA, 10 bp, Artificial Sequence
  Synthetic Sequence
ccgaactact

SEQ ID NO: 6112 - DNA, 10 bp, Artificial Sequence
  Synthetic Sequence
ggtgtctggc

SEQ ID NO: 6113 - DNA, 10 bp, Artificial Sequence
  Synthetic Sequence
gcgtagcaaa

SEQ ID NO: 6114 - DNA, 10 bp, Artificial Sequence
  Synthetic Sequence
gccgtagagt

SEQ ID NO: 6115 - DNA, 10 bp, Artificial Sequence
  Synthetic Sequence
gtcaagccct

SEQ ID NO: 6116 - DNA, 10 bp, Artificial Sequence
  Synthetic Sequence
ccaaggaacc

SEQ ID NO: 6117 - DNA, 10 bp, Artificial Sequence
  Synthetic Sequence
ccctaaagac

SEQ ID NO: 6118 - DNA, 10 bp, Artificial Sequence
  Synthetic Sequence
aagcgataca

SEQ ID NO: 6119 - DNA, 10 bp, Artificial Sequence
  Synthetic Sequence
aagccgcgct

SEQ ID NO: 6120 - DNA, 10 bp, Artificial Sequence
  Synthetic Sequence
gccaaatccg

SEQ ID NO: 6121 - DNA, 10 bp, Artificial Sequence
  Synthetic Sequence
gactcgtgta

SEQ ID NO: 6122 - DNA, 10 bp, Artificial Sequence
  Synthetic Sequence
ccatacaggg

SEQ ID NO: 6123 - DNA, 10 bp, Artificial Sequence
  Synthetic Sequence
tgtaggcaga

SEQ ID NO: 6124 - DNA, 10 bp, Artificial Sequence
  Synthetic Sequence
ctctagaacg

SEQ ID NO: 6125 - DNA, 10 bp, Artificial Sequence
  Synthetic Sequence
ggtctagact

SEQ ID NO: 6126 - DNA, 10 bp, Artificial Sequence
  Synthetic Sequence
aaacttggga

SEQ ID NO: 6127 - DNA, 10 bp, Artificial Sequence
  Synthetic Sequence
aaagcgttcg

SEQ ID NO: 6128 - DNA, 10 bp, Artificial Sequence
  Synthetic Sequence
tcctttgtac

SEQ ID NO: 6129 - DNA, 10 bp, Artificial Sequence
  Synthetic Sequence
ccgaatgcct

SEQ ID NO: 6130 - DNA, 10 bp, Artificial Sequence
  Synthetic Sequence
cctgctattt

SEQ ID NO: 6131 - DNA, 10 bp, Artificial Sequence
  Synthetic Sequence
tggttaaagt

SEQ ID NO: 6132 - DNA, 10 bp, Artificial Sequence
  Synthetic Sequence
ctctcttgat

SEQ ID NO: 6133 - DNA, 10 bp, Artificial Sequence
  Synthetic Sequence
tccacaaagc

SEQ ID NO: 6134 - DNA, 10 bp, Artificial Sequence
  Synthetic Sequence
gttcgttcga

SEQ ID NO: 6135 - DNA, 10 bp, Artificial Sequence
  Synthetic Sequence
ctgccactct

SEQ ID NO: 6136 - DNA, 10 bp, Artificial Sequence
  Synthetic Sequence
catagtccac

SEQ ID NO: 6137 - DNA, 10 bp, Artificial Sequence
  Synthetic Sequence
gggtgagcaa

SEQ ID NO: 6138 - DNA, 10 bp, Artificial Sequence
  Synthetic Sequence
ggtcgaacac

SEQ ID NO: 6139 - DNA, 10 bp, Artificial Sequence
  Synthetic Sequence
cgccgtagca

SEQ ID NO: 6140 - DNA, 10 bp, Artificial Sequence
  Synthetic Sequence
catatctctt

SEQ ID NO: 6141 - DNA, 10 bp, Artificial Sequence
  Synthetic Sequence
cttaatccca

SEQ ID NO: 6142 - DNA, 10 bp, Artificial Sequence
  Synthetic Sequence
agccgcactc

SEQ ID NO: 6143 - DNA, 10 bp, Artificial Sequence
  Synthetic Sequence
cacggtacct

SEQ ID NO: 6144 - DNA, 10 bp, Artificial Sequence
  Synthetic Sequence
ggtatctgct

SEQ ID NO: 6145 - DNA, 10 bp, Artificial Sequence
  Synthetic Sequence
aatagcgacg

SEQ ID NO: 6146 - DNA, 10 bp, Artificial Sequence
  Synthetic Sequence
atttgccaca

SEQ ID NO: 6147 - DNA, 10 bp, Artificial Sequence
  Synthetic Sequence
ccacaacacg

SEQ ID NO: 6148 - DNA, 10 bp, Artificial Sequence
  Synthetic Sequence
tcttcgcatt

SEQ ID NO: 6149 - DNA, 10 bp, Artificial Sequence
  Synthetic Sequence
tacgccgtat

SEQ ID NO: 6150 - DNA, 10 bp, Artificial Sequence
  Synthetic Sequence
atgggtagaa

SEQ ID NO: 6151 - DNA, 10 bp, Artificial Sequence
  Synthetic Sequence
cgctttactc

SEQ ID NO: 6152 - DNA, 10 bp, Artificial Sequence
  Synthetic Sequence
cactgtatac

SEQ ID NO: 6153 - DNA, 10 bp, Artificial Sequence
  Synthetic Sequence
tacggcgcct

SEQ ID NO: 6154 - DNA, 10 bp, Artificial Sequence
  Synthetic Sequence
ctgacggacc

SEQ ID NO: 6155 - DNA, 10 bp, Artificial Sequence
  Synthetic Sequence
agcagtggca

SEQ ID NO: 6156 - DNA, 10 bp, Artificial Sequence
  Synthetic Sequence
cccggcagat

SEQ ID NO: 6157 - DNA, 10 bp, Artificial Sequence
  Synthetic Sequence
atcccacgcc

SEQ ID NO: 6158 - DNA, 10 bp, Artificial Sequence
  Synthetic Sequence
ccgatgcagt

SEQ ID NO: 6159 - DNA, 10 bp, Artificial Sequence
  Synthetic Sequence
cattaccttt

SEQ ID NO: 6160 - DNA, 10 bp, Artificial Sequence
  Synthetic Sequence
atttggtgta

SEQ ID NO: 6161 - DNA, 10 bp, Artificial Sequence
  Synthetic Sequence
gtgaggcgaa

SEQ ID NO: 6162 - DNA, 10 bp, Artificial Sequence
  Synthetic Sequence
cacggttctg

SEQ ID NO: 6163 - DNA, 10 bp, Artificial Sequence
  Synthetic Sequence
ctatcctgcg

SEQ ID NO: 6164 - DNA, 10 bp, Artificial Sequence
  Synthetic Sequence
acattaaggg

SEQ ID NO: 6165 - DNA, 10 bp, Artificial Sequence
  Synthetic Sequence
tagattgaaa

SEQ ID NO: 6166 - DNA, 10 bp, Artificial Sequence
  Synthetic Sequence
taccgtgtgg

SEQ ID NO: 6167 - DNA, 10 bp, Artificial Sequence
  Synthetic Sequence
cgtgattcct

SEQ ID NO: 6168 - DNA, 10 bp, Artificial Sequence
  Synthetic Sequence
gacgcgatta

SEQ ID NO: 6169 - DNA, 10 bp, Artificial Sequence
  Synthetic Sequence
tagtcattta

SEQ ID NO: 6170 - DNA, 10 bp, Artificial Sequence
  Synthetic Sequence
agttccacag

SEQ ID NO: 6171 - DNA, 10 bp, Artificial Sequence
  Synthetic Sequence
cttgtaaacc

SEQ ID NO: 6172 - DNA, 10 bp, Artificial Sequence
  Synthetic Sequence
cattctaagt

SEQ ID NO: 6173 - DNA, 10 bp, Artificial Sequence
  Synthetic Sequence
ttgcggagat

SEQ ID NO: 6174 - DNA, 10 bp, Artificial Sequence
  Synthetic Sequence
aaggcgcttt

SEQ ID NO: 6175 - DNA, 10 bp, Artificial Sequence
  Synthetic Sequence
ccaaccttgc

SEQ ID NO: 6176 - DNA, 10 bp, Artificial Sequence
  Synthetic Sequence
tattgtacaa

SEQ ID NO: 6177 - DNA, 10 bp, Artificial Sequence
  Synthetic Sequence
ccggcaatgg

SEQ ID NO: 6178 - DNA, 10 bp, Artificial Sequence
  Synthetic Sequence
cctgcaggca

SEQ ID NO: 6179 - DNA, 10 bp, Artificial Sequence
  Synthetic Sequence
gtaccttgca

SEQ ID NO: 6180 - DNA, 10 bp, Artificial Sequence
  Synthetic Sequence
ggagagacta

SEQ ID NO: 6181 - DNA, 10 bp, Artificial Sequence
  Synthetic Sequence
acgggtcgct

SEQ ID NO: 6182 - DNA, 10 bp, Artificial Sequence
  Synthetic Sequence
gacttcatag

SEQ ID NO: 6183 - DNA, 10 bp, Artificial Sequence
  Synthetic Sequence
caaagcatgc

SEQ ID NO: 6184 - DNA, 10 bp, Artificial Sequence
  Synthetic Sequence
actaggctaa

SEQ ID NO: 6185 - DNA, 10 bp, Artificial Sequence
  Synthetic Sequence
gggccagaca

SEQ ID NO: 6186 - DNA, 10 bp, Artificial Sequence
  Synthetic Sequence
tcacccagcc

SEQ ID NO: 6187 - DNA, 10 bp, Artificial Sequence
  Synthetic Sequence
gtagtgaact

SEQ ID NO: 6188 - DNA, 10 bp, Artificial Sequence
  Synthetic Sequence
aattgtgatg

SEQ ID NO: 6189 - DNA, 10 bp, Artificial Sequence
  Synthetic Sequence
tccagctgag

SEQ ID NO: 6190 - DNA, 10 bp, Artificial Sequence
  Synthetic Sequence
ggacctggtg

SEQ ID NO: 6191 - DNA, 10 bp, Artificial Sequence
  Synthetic Sequence
gctgagcagt

SEQ ID NO: 6192 - DNA, 10 bp, Artificial Sequence
  Synthetic Sequence
acatgaccat

SEQ ID NO: 6193 - DNA, 10 bp, Artificial Sequence
  Synthetic Sequence
tgactgccaa

SEQ ID NO: 6194 - DNA, 10 bp, Artificial Sequence
  Synthetic Sequence
atgcaggatt

SEQ ID NO: 6195 - DNA, 10 bp, Artificial Sequence
  Synthetic Sequence
atcgggtaag

SEQ ID NO: 6196 - DNA, 10 bp, Artificial Sequence
  Synthetic Sequence
cgtccgtcga

SEQ ID NO: 6197 - DNA, 10 bp, Artificial Sequence
  Synthetic Sequence
gttgtgagag

SEQ ID NO: 6198 - DNA, 10 bp, Artificial Sequence
  Synthetic Sequence
tacaactgct

SEQ ID NO: 6199 - DNA, 10 bp, Artificial Sequence
  Synthetic Sequence
tattcacgtc

SEQ ID NO: 6200 - DNA, 10 bp, Artificial Sequence
  Synthetic Sequence
agccgctcca

SEQ ID NO: 6201 - DNA, 10 bp, Artificial Sequence
  Synthetic Sequence
cactcgaatg

SEQ ID NO: 6202 - DNA, 10 bp, Artificial Sequence
  Synthetic Sequence
tactgcccag

SEQ ID NO: 6203 - DNA, 10 bp, Artificial Sequence
  Synthetic Sequence
atagtcgtgg

SEQ ID NO: 6204 - DNA, 10 bp, Artificial Sequence
  Synthetic Sequence
ggcaccttct

SEQ ID NO: 6205 - DNA, 10 bp, Artificial Sequence
  Synthetic Sequence
acgagaaagg

SEQ ID NO: 6206 - DNA, 10 bp, Artificial Sequence
  Synthetic Sequence
taactaagtc

SEQ ID NO: 6207 - DNA, 10 bp, Artificial Sequence
  Synthetic Sequence
ccctgttcca

SEQ ID NO: 6208 - DNA, 10 bp, Artificial Sequence
  Synthetic Sequence
cgggcaacga

SEQ ID NO: 6209 - DNA, 10 bp, Artificial Sequence
  Synthetic Sequence
acaggcgcag

SEQ ID NO: 6210 - DNA, 10 bp, Artificial Sequence
  Synthetic Sequence
atttattacc

SEQ ID NO: 6211 - DNA, 10 bp, Artificial Sequence
  Synthetic Sequence
gagtttacgg

SEQ ID NO: 6212 - DNA, 10 bp, Artificial Sequence
  Synthetic Sequence
aggagaattt

SEQ ID NO: 6213 - DNA, 10 bp, Artificial Sequence
  Synthetic Sequence
tcgtgtgttg

SEQ ID NO: 6214 - DNA, 10 bp, Artificial Sequence
  Synthetic Sequence
tggccaaccg

SEQ ID NO: 6215 - DNA, 10 bp, Artificial Sequence
  Synthetic Sequence
taatccggat

SEQ ID NO: 6216 - DNA, 10 bp, Artificial Sequence
  Synthetic Sequence
cgtagcggca

SEQ ID NO: 6217 - DNA, 10 bp, Artificial Sequence
  Synthetic Sequence
catttaactc

SEQ ID NO: 6218 - DNA, 10 bp, Artificial Sequence
  Synthetic Sequence
tctcatttgt

SEQ ID NO: 6219 - DNA, 10 bp, Artificial Sequence
  Synthetic Sequence
aagacaacat

SEQ ID NO: 6220 - DNA, 10 bp, Artificial Sequence
  Synthetic Sequence
gcagagggag

SEQ ID NO: 6221 - DNA, 10 bp, Artificial Sequence
  Synthetic Sequence
atctaggcgg

SEQ ID NO: 6222 - DNA, 10 bp, Artificial Sequence
  Synthetic Sequence
aaacttgccg

SEQ ID NO: 6223 - DNA, 10 bp, Artificial Sequence
  Synthetic Sequence
tctttagcgg

SEQ ID NO: 6224 - DNA, 10 bp, Artificial Sequence
  Synthetic Sequence
gactgtattt

SEQ ID NO: 6225 - DNA, 10 bp, Artificial Sequence
  Synthetic Sequence
tacatgcaaa

SEQ ID NO: 6226 - DNA, 10 bp, Artificial Sequence
  Synthetic Sequence
gttgtggttt

SEQ ID NO: 6227 - DNA, 10 bp, Artificial Sequence
  Synthetic Sequence
gtctggatta

SEQ ID NO: 6228 - DNA, 10 bp, Artificial Sequence
  Synthetic Sequence
tactcaccat

SEQ ID NO: 6229 - DNA, 10 bp, Artificial Sequence
  Synthetic Sequence
agcagtccct

SEQ ID NO: 6230 - DNA, 10 bp, Artificial Sequence
  Synthetic Sequence
cccgacatcc

SEQ ID NO: 6231 - DNA, 10 bp, Artificial Sequence
  Synthetic Sequence
tttaagggct

SEQ ID NO: 6232 - DNA, 10 bp, Artificial Sequence
  Synthetic Sequence
agacgggcag

SEQ ID NO: 6233 - DNA, 10 bp, Artificial Sequence
  Synthetic Sequence
caggaagtac

SEQ ID NO: 6234 - DNA, 10 bp, Artificial Sequence
  Synthetic Sequence
gcaccggcaa

SEQ ID NO: 6235 - DNA, 10 bp, Artificial Sequence
  Synthetic Sequence
cagctcctca

SEQ ID NO: 6236 - DNA, 10 bp, Artificial Sequence
  Synthetic Sequence
aacaccgcca

SEQ ID NO: 6237 - DNA, 10 bp, Artificial Sequence
  Synthetic Sequence
aactagaccc

SEQ ID NO: 6238 - DNA, 10 bp, Artificial Sequence
  Synthetic Sequence
tgaagcggac

SEQ ID NO: 6239 - DNA, 10 bp, Artificial Sequence
  Synthetic Sequence
gatcgataac

SEQ ID NO: 6240 - DNA, 10 bp, Artificial Sequence
  Synthetic Sequence
ggtaaagaac

SEQ ID NO: 6241 - DNA, 10 bp, Artificial Sequence
  Synthetic Sequence
taaacacctt

SEQ ID NO: 6242 - DNA, 10 bp, Artificial Sequence
  Synthetic Sequence
tatctattcc

SEQ ID NO: 6243 - DNA, 10 bp, Artificial Sequence
  Synthetic Sequence
agcctgagct

SEQ ID NO: 6244 - DNA, 10 bp, Artificial Sequence
  Synthetic Sequence
cgccgtattc

SEQ ID NO: 6245 - DNA, 10 bp, Artificial Sequence
  Synthetic Sequence
cgttaagtgc

SEQ ID NO: 6246 - DNA, 10 bp, Artificial Sequence
  Synthetic Sequence
gctggccttt

SEQ ID NO: 6247 - DNA, 10 bp, Artificial Sequence
  Synthetic Sequence
gtaacaattg

SEQ ID NO: 6248 - DNA, 10 bp, Artificial Sequence
  Synthetic Sequence
atatccacta

SEQ ID NO: 6249 - DNA, 10 bp, Artificial Sequence
  Synthetic Sequence
catccgaggc

SEQ ID NO: 6250 - DNA, 10 bp, Artificial Sequence
  Synthetic Sequence
ttaggcggag

SEQ ID NO: 6251 - DNA, 10 bp, Artificial Sequence
  Synthetic Sequence
cgacaaatat

SEQ ID NO: 6252 - DNA, 10 bp, Artificial Sequence
  Synthetic Sequence
ggttagagat

SEQ ID NO: 6253 - DNA, 10 bp, Artificial Sequence
  Synthetic Sequence
cggactcgtg

SEQ ID NO: 6254 - DNA, 10 bp, Artificial Sequence
  Synthetic Sequence
cttgccaaat

SEQ ID NO: 6255 - DNA, 10 bp, Artificial Sequence
  Synthetic Sequence
taatgaccta

SEQ ID NO: 6256 - DNA, 10 bp, Artificial Sequence
  Synthetic Sequence
tcgtgttgga

SEQ ID NO: 6257 - DNA, 10 bp, Artificial Sequence
  Synthetic Sequence
gtacccatga

SEQ ID NO: 6258 - DNA, 10 bp, Artificial Sequence
  Synthetic Sequence
acgtcaccag

SEQ ID NO: 6259 - DNA, 10 bp, Artificial Sequence
  Synthetic Sequence
tcaattctga

SEQ ID NO: 6260 - DNA, 10 bp, Artificial Sequence
  Synthetic Sequence
gaccagctgg

SEQ ID NO: 6261 - DNA, 10 bp, Artificial Sequence
  Synthetic Sequence
tataccgtgg

SEQ ID NO: 6262 - DNA, 10 bp, Artificial Sequence
  Synthetic Sequence
cgcagcgaag

SEQ ID NO: 6263 - DNA, 10 bp, Artificial Sequence
  Synthetic Sequence
gaatatttat

SEQ ID NO: 6264 - DNA, 10 bp, Artificial Sequence
  Synthetic Sequence
ggtgagtccg

SEQ ID NO: 6265 - DNA, 10 bp, Artificial Sequence
  Synthetic Sequence
tgatggcacc

SEQ ID NO: 6266 - DNA, 10 bp, Artificial Sequence
  Synthetic Sequence
ttcatgacgc

SEQ ID NO: 6267 - DNA, 10 bp, Artificial Sequence
  Synthetic Sequence
agtagaagta

SEQ ID NO: 6268 - DNA, 10 bp, Artificial Sequence
  Synthetic Sequence
ctatgtaagg

SEQ ID NO: 6269 - DNA, 10 bp, Artificial Sequence
  Synthetic Sequence
ctggcgccat

SEQ ID NO: 6270 - DNA, 10 bp, Artificial Sequence
  Synthetic Sequence
aaccgcattt

SEQ ID NO: 6271 - DNA, 10 bp, Artificial Sequence
  Synthetic Sequence
tttccgacat

SEQ ID NO: 6272 - DNA, 10 bp, Artificial Sequence
  Synthetic Sequence
aggaaccatg

SEQ ID NO: 6273 - DNA, 10 bp, Artificial Sequence
  Synthetic Sequence
acgaaatcac

SEQ ID NO: 6274 - DNA, 10 bp, Artificial Sequence
  Synthetic Sequence
agagatacca

SEQ ID NO: 6275 - DNA, 10 bp, Artificial Sequence
  Synthetic Sequence
acggacgctg

SEQ ID NO: 6276 - DNA, 10 bp, Artificial Sequence
  Synthetic Sequence
acgtagtgcg

SEQ ID NO: 6277 - DNA, 10 bp, Artificial Sequence
  Synthetic Sequence
gaccgctctc

SEQ ID NO: 6278 - DNA, 10 bp, Artificial Sequence
  Synthetic Sequence
ttgtgctcaa

SEQ ID NO: 6279 - DNA, 10 bp, Artificial Sequence
  Synthetic Sequence
tgctgcgtgg

SEQ ID NO: 6280 - DNA, 10 bp, Artificial Sequence
  Synthetic Sequence
gtattccatc

SEQ ID NO: 6281 - DNA, 10 bp, Artificial Sequence
  Synthetic Sequence
tcaaacagag

SEQ ID NO: 6282 - DNA, 10 bp, Artificial Sequence
  Synthetic Sequence
ttccgacttc

SEQ ID NO: 6283 - DNA, 10 bp, Artificial Sequence
  Synthetic Sequence
ctgcatcggg

SEQ ID NO: 6284 - DNA, 10 bp, Artificial Sequence
  Synthetic Sequence
gaaagtacag

SEQ ID NO: 6285 - DNA, 10 bp, Artificial Sequence
  Synthetic Sequence
cccgaggctt

SEQ ID NO: 6286 - DNA, 10 bp, Artificial Sequence
  Synthetic Sequence
gaacatcgtt

SEQ ID NO: 6287 - DNA, 10 bp, Artificial Sequence
  Synthetic Sequence
tacttgtctg

SEQ ID NO: 6288 - DNA, 10 bp, Artificial Sequence
  Synthetic Sequence
gacatctctg

SEQ ID NO: 6289 - DNA, 10 bp, Artificial Sequence
  Synthetic Sequence
tcccacattt

SEQ ID NO: 6290 - DNA, 10 bp, Artificial Sequence
  Synthetic Sequence
cctttaacct

SEQ ID NO: 6291 - DNA, 10 bp, Artificial Sequence
  Synthetic Sequence
caatatcggc

SEQ ID NO: 6292 - DNA, 10 bp, Artificial Sequence
  Synthetic Sequence
aactactgaa

SEQ ID NO: 6293 - DNA, 10 bp, Artificial Sequence
  Synthetic Sequence
agatgcagga

SEQ ID NO: 6294 - DNA, 10 bp, Artificial Sequence
  Synthetic Sequence
tctagggcga

SEQ ID NO: 6295 - DNA, 10 bp, Artificial Sequence
  Synthetic Sequence
ctagtctgac

SEQ ID NO: 6296 - DNA, 10 bp, Artificial Sequence
  Synthetic Sequence
gagtactttc

SEQ ID NO: 6297 - DNA, 10 bp, Artificial Sequence
  Synthetic Sequence
acaccagatc

SEQ ID NO: 6298 - DNA, 10 bp, Artificial Sequence
  Synthetic Sequence
atatggatgc

SEQ ID NO: 6299 - DNA, 10 bp, Artificial Sequence
  Synthetic Sequence
gaaacatcct

SEQ ID NO: 6300 - DNA, 10 bp, Artificial Sequence
  Synthetic Sequence
aagatttact

SEQ ID NO: 6301 - DNA, 10 bp, Artificial Sequence
  Synthetic Sequence
cgtcttacga

SEQ ID NO: 6302 - DNA, 10 bp, Artificial Sequence
  Synthetic Sequence
gtccctaaag

SEQ ID NO: 6303 - DNA, 10 bp, Artificial Sequence
  Synthetic Sequence
gatccggaat

SEQ ID NO: 6304 - DNA, 10 bp, Artificial Sequence
  Synthetic Sequence
caccaacgat

SEQ ID NO: 6305 - DNA, 10 bp, Artificial Sequence
  Synthetic Sequence
agcgtgtatg

SEQ ID NO: 6306 - DNA, 10 bp, Artificial Sequence
  Synthetic Sequence
gagggaccct

SEQ ID NO: 6307 - DNA, 10 bp, Artificial Sequence
  Synthetic Sequence
cgcaatggct

SEQ ID NO: 6308 - DNA, 10 bp, Artificial Sequence
  Synthetic Sequence
tgcgtaccta

SEQ ID NO: 6309 - DNA, 10 bp, Artificial Sequence
  Synthetic Sequence
ctgcctaacc

SEQ ID NO: 6310 - DNA, 10 bp, Artificial Sequence
  Synthetic Sequence
tcatggaggt

SEQ ID NO: 6311 - DNA, 10 bp, Artificial Sequence
  Synthetic Sequence
tgcagttgct

SEQ ID NO: 6312 - DNA, 10 bp, Artificial Sequence
  Synthetic Sequence
gcaatagcac

SEQ ID NO: 6313 - DNA, 10 bp, Artificial Sequence
  Synthetic Sequence
ccgatgtggc

SEQ ID NO: 6314 - DNA, 10 bp, Artificial Sequence
  Synthetic Sequence
actactgatt

SEQ ID NO: 6315 - DNA, 10 bp, Artificial Sequence
  Synthetic Sequence
gatcaggatc

SEQ ID NO: 6316 - DNA, 10 bp, Artificial Sequence
  Synthetic Sequence
gcaaaggctt

SEQ ID NO: 6317 - DNA, 10 bp, Artificial Sequence
  Synthetic Sequence
agctcttccg

SEQ ID NO: 6318 - DNA, 10 bp, Artificial Sequence
  Synthetic Sequence
tcacgactag

SEQ ID NO: 6319 - DNA, 10 bp, Artificial Sequence
  Synthetic Sequence
cggaggagtt

SEQ ID NO: 6320 - DNA, 10 bp, Artificial Sequence
  Synthetic Sequence
ttgggagatc

SEQ ID NO: 6321 - DNA, 10 bp, Artificial Sequence
  Synthetic Sequence
gttcacagat

SEQ ID NO: 6322 - DNA, 10 bp, Artificial Sequence
  Synthetic Sequence
gaacagcacc

SEQ ID NO: 6323 - DNA, 10 bp, Artificial Sequence
  Synthetic Sequence
catatcctgg

SEQ ID NO: 6324 - DNA, 10 bp, Artificial Sequence
  Synthetic Sequence
tccaactcta

SEQ ID NO: 6325 - DNA, 10 bp, Artificial Sequence
  Synthetic Sequence
cccgaatgtc

SEQ ID NO: 6326 - DNA, 10 bp, Artificial Sequence
  Synthetic Sequence
gcctcgagat

SEQ ID NO: 6327 - DNA, 10 bp, Artificial Sequence
  Synthetic Sequence
taggagacgt

SEQ ID NO: 6328 - DNA, 10 bp, Artificial Sequence
  Synthetic Sequence
gaaattattt

SEQ ID NO: 6329 - DNA, 10 bp, Artificial Sequence
  Synthetic Sequence
tcgcactccc

SEQ ID NO: 6330 - DNA, 10 bp, Artificial Sequence
  Synthetic Sequence
catgaccggt

SEQ ID NO: 6331 - DNA, 10 bp, Artificial Sequence
  Synthetic Sequence
gcgtctctta

SEQ ID NO: 6332 - DNA, 10 bp, Artificial Sequence
  Synthetic Sequence
attagtgcca

SEQ ID NO: 6333 - DNA, 10 bp, Artificial Sequence
  Synthetic Sequence
cataaattcg

SEQ ID NO: 6334 - DNA, 10 bp, Artificial Sequence
  Synthetic Sequence
agattcatgg

SEQ ID NO: 6335 - DNA, 10 bp, Artificial Sequence
  Synthetic Sequence
gggtcatggc

SEQ ID NO: 6336 - DNA, 10 bp, Artificial Sequence
  Synthetic Sequence
gtgaatttgt

SEQ ID NO: 6337 - DNA, 10 bp, Artificial Sequence
  Synthetic Sequence
taactggaat

SEQ ID NO: 6338 - DNA, 10 bp, Artificial Sequence
  Synthetic Sequence
taggccatgc

SEQ ID NO: 6339 - DNA, 10 bp, Artificial Sequence
  Synthetic Sequence
tgtaattacg

SEQ ID NO: 6340 - DNA, 10 bp, Artificial Sequence
  Synthetic Sequence
cctgcgatgc

SEQ ID NO: 6341 - DNA, 10 bp, Artificial Sequence
  Synthetic Sequence
tggtgcaaga

SEQ ID NO: 6342 - DNA, 10 bp, Artificial Sequence
  Synthetic Sequence
aaaggtgcgg

SEQ ID NO: 6343 - DNA, 10 bp, Artificial Sequence
  Synthetic Sequence
agagttcctg

SEQ ID NO: 6344 - DNA, 10 bp, Artificial Sequence
  Synthetic Sequence
cgaccacacc

SEQ ID NO: 6345 - DNA, 10 bp, Artificial Sequence
  Synthetic Sequence
aaaggatcat

SEQ ID NO: 6346 - DNA, 10 bp, Artificial Sequence
  Synthetic Sequence
cctctaaagc

SEQ ID NO: 6347 - DNA, 10 bp, Artificial Sequence
  Synthetic Sequence
cgaggctcac

SEQ ID NO: 6348 - DNA, 10 bp, Artificial Sequence
  Synthetic Sequence
gatcctcacc

SEQ ID NO: 6349 - DNA, 10 bp, Artificial Sequence
  Synthetic Sequence
gacgtgtgaa

SEQ ID NO: 6350 - DNA, 10 bp, Artificial Sequence
  Synthetic Sequence
acagcgaatc

SEQ ID NO: 6351 - DNA, 10 bp, Artificial Sequence
  Synthetic Sequence
gtttagggtc

SEQ ID NO: 6352 - DNA, 10 bp, Artificial Sequence
  Synthetic Sequence
tccagagcgc

SEQ ID NO: 6353 - DNA, 10 bp, Artificial Sequence
  Synthetic Sequence
atccgctacc

SEQ ID NO: 6354 - DNA, 10 bp, Artificial Sequence
  Synthetic Sequence
agttctcacc

SEQ ID NO: 6355 - DNA, 10 bp, Artificial Sequence
  Synthetic Sequence
acaatcggtt

SEQ ID NO: 6356 - DNA, 10 bp, Artificial Sequence
  Synthetic Sequence
cgatacttgc

SEQ ID NO: 6357 - DNA, 10 bp, Artificial Sequence
  Synthetic Sequence
tatctataat

SEQ ID NO: 6358 - DNA, 10 bp, Artificial Sequence
  Synthetic Sequence
cgcgttgaat

SEQ ID NO: 6359 - DNA, 10 bp, Artificial Sequence
  Synthetic Sequence
ctcgctttac

SEQ ID NO: 6360 - DNA, 10 bp, Artificial Sequence
  Synthetic Sequence
ctatttagga

SEQ ID NO: 6361 - DNA, 10 bp, Artificial Sequence
  Synthetic Sequence
atagtggtat

SEQ ID NO: 6362 - DNA, 10 bp, Artificial Sequence
  Synthetic Sequence
tgtgtctact

SEQ ID NO: 6363 - DNA, 10 bp, Artificial Sequence
  Synthetic Sequence
actgtcttta

SEQ ID NO: 6364 - DNA, 10 bp, Artificial Sequence
  Synthetic Sequence
gagttcccaa

SEQ ID NO: 6365 - DNA, 10 bp, Artificial Sequence
  Synthetic Sequence
gcatgtcttc

SEQ ID NO: 6366 - DNA, 10 bp, Artificial Sequence
  Synthetic Sequence
agagtgacga

SEQ ID NO: 6367 - DNA, 10 bp, Artificial Sequence
  Synthetic Sequence
gagcgaccag

SEQ ID NO: 6368 - DNA, 10 bp, Artificial Sequence
  Synthetic Sequence
gcgctgtata

SEQ ID NO: 6369 - DNA, 10 bp, Artificial Sequence
  Synthetic Sequence
agctgtatct

SEQ ID NO: 6370 - DNA, 10 bp, Artificial Sequence
  Synthetic Sequence
tgcggagagc

SEQ ID NO: 6371 - DNA, 10 bp, Artificial Sequence
  Synthetic Sequence
accatgcggg

SEQ ID NO: 6372 - DNA, 10 bp, Artificial Sequence
  Synthetic Sequence
gttccggcag

SEQ ID NO: 6373 - DNA, 10 bp, Artificial Sequence
  Synthetic Sequence
cgacgtagag

SEQ ID NO: 6374 - DNA, 10 bp, Artificial Sequence
  Synthetic Sequence
ctcgctggaa

SEQ ID NO: 6375 - DNA, 10 bp, Artificial Sequence
  Synthetic Sequence
tcttcaatct

SEQ ID NO: 6376 - DNA, 10 bp, Artificial Sequence
  Synthetic Sequence
acgacgtact

SEQ ID NO: 6377 - DNA, 10 bp, Artificial Sequence
  Synthetic Sequence
atgactccaa

SEQ ID NO: 6378 - DNA, 10 bp, Artificial Sequence
  Synthetic Sequence
tagttacatg

SEQ ID NO: 6379 - DNA, 10 bp, Artificial Sequence
  Synthetic Sequence
cggtgccaca

SEQ ID NO: 6380 - DNA, 10 bp, Artificial Sequence
  Synthetic Sequence
cagtcttgtg

SEQ ID NO: 6381 - DNA, 10 bp, Artificial Sequence
  Synthetic Sequence
ctctgtaggc

SEQ ID NO: 6382 - DNA, 10 bp, Artificial Sequence
  Synthetic Sequence
tgacccaaca

SEQ ID NO: 6383 - DNA, 10 bp, Artificial Sequence
  Synthetic Sequence
agtgaacagt

SEQ ID NO: 6384 - DNA, 10 bp, Artificial Sequence
  Synthetic Sequence
tcaaatccac

SEQ ID NO: 6385 - DNA, 10 bp, Artificial Sequence
  Synthetic Sequence
cctaggtggt

SEQ ID NO: 6386 - DNA, 10 bp, Artificial Sequence
  Synthetic Sequence
ggacgccatt

SEQ ID NO: 6387 - DNA, 10 bp, Artificial Sequence
  Synthetic Sequence
aaagagatgt

SEQ ID NO: 6388 - DNA, 10 bp, Artificial Sequence
  Synthetic Sequence
agcgtccata

SEQ ID NO: 6389 - DNA, 10 bp, Artificial Sequence
  Synthetic Sequence
tacgcctgtt

SEQ ID NO: 6390 - DNA, 10 bp, Artificial Sequence
  Synthetic Sequence
taacagtcaa

SEQ ID NO: 6391 - DNA, 10 bp, Artificial Sequence
  Synthetic Sequence
ctgcttatgc

SEQ ID NO: 6392 - DNA, 10 bp, Artificial Sequence
  Synthetic Sequence
gcagcgactt

SEQ ID NO: 6393 - DNA, 10 bp, Artificial Sequence
  Synthetic Sequence
aagaaagaaa

SEQ ID NO: 6394 - DNA, 10 bp, Artificial Sequence
  Synthetic Sequence
cgacctaaac

SEQ ID NO: 6395 - DNA, 10 bp, Artificial Sequence
  Synthetic Sequence
cttgagagat

SEQ ID NO: 6396 - DNA, 10 bp, Artificial Sequence
  Synthetic Sequence
atgtggacca

SEQ ID NO: 6397 - DNA, 10 bp, Artificial Sequence
  Synthetic Sequence
tgactatatc

SEQ ID NO: 6398 - DNA, 10 bp, Artificial Sequence
  Synthetic Sequence
accgcacgac

SEQ ID NO: 6399 - DNA, 10 bp, Artificial Sequence
  Synthetic Sequence
ccgagcttgg

SEQ ID NO: 6400 - DNA, 10 bp, Artificial Sequence
  Synthetic Sequence
gctaagtcta

SEQ ID NO: 6401 - DNA, 10 bp, Artificial Sequence
  Synthetic Sequence
gcttatgtag

SEQ ID NO: 6402 - DNA, 10 bp, Artificial Sequence
  Synthetic Sequence
cgctattctt

SEQ ID NO: 6403 - DNA, 10 bp, Artificial Sequence
  Synthetic Sequence
tgatttgtca

SEQ ID NO: 6404 - DNA, 10 bp, Artificial Sequence
  Synthetic Sequence
ggcaatctaa

SEQ ID NO: 6405 - DNA, 10 bp, Artificial Sequence
  Synthetic Sequence
tacacactcc

SEQ ID NO: 6406 - DNA, 10 bp, Artificial Sequence
  Synthetic Sequence
attcacttcg

SEQ ID NO: 6407 - DNA, 10 bp, Artificial Sequence
  Synthetic Sequence
gcacgtggaa

SEQ ID NO: 6408 - DNA, 10 bp, Artificial Sequence
  Synthetic Sequence
cgatccggtt

SEQ ID NO: 6409 - DNA, 10 bp, Artificial Sequence
  Synthetic Sequence
agatgtcatt

SEQ ID NO: 6410 - DNA, 10 bp, Artificial Sequence
  Synthetic Sequence
ggctccgaag

SEQ ID NO: 6411 - DNA, 10 bp, Artificial Sequence
  Synthetic Sequence
aggcgtggag

SEQ ID NO: 6412 - DNA, 10 bp, Artificial Sequence
  Synthetic Sequence
cgcatcggtc

SEQ ID NO: 6413 - DNA, 10 bp, Artificial Sequence
  Synthetic Sequence
gagataatga

SEQ ID NO: 6414 - DNA, 10 bp, Artificial Sequence
  Synthetic Sequence
attcatggtt

SEQ ID NO: 6415 - DNA, 10 bp, Artificial Sequence
  Synthetic Sequence
ggtcattagc

SEQ ID NO: 6416 - DNA, 10 bp, Artificial Sequence
  Synthetic Sequence
tatccacgcg

SEQ ID NO: 6417 - DNA, 10 bp, Artificial Sequence
  Synthetic Sequence
caaagttcct

SEQ ID NO: 6418 - DNA, 10 bp, Artificial Sequence
  Synthetic Sequence
ccaagcgcct

SEQ ID NO: 6419 - DNA, 10 bp, Artificial Sequence
  Synthetic Sequence
tatatcatca

SEQ ID NO: 6420 - DNA, 10 bp, Artificial Sequence
  Synthetic Sequence
gccgacacat

SEQ ID NO: 6421 - DNA, 10 bp, Artificial Sequence
  Synthetic Sequence
catagtgtgc

SEQ ID NO: 6422 - DNA, 10 bp, Artificial Sequence
  Synthetic Sequence
cagcccaagg

SEQ ID NO: 6423 - DNA, 10 bp, Artificial Sequence
  Synthetic Sequence
ttcattgtca

SEQ ID NO: 6424 - DNA, 10 bp, Artificial Sequence
  Synthetic Sequence
gacaagtccc

SEQ ID NO: 6425 - DNA, 10 bp, Artificial Sequence
  Synthetic Sequence
acggcgtgat

SEQ ID NO: 6426 - DNA, 10 bp, Artificial Sequence
  Synthetic Sequence
tttatactca

SEQ ID NO: 6427 - DNA, 10 bp, Artificial Sequence
  Synthetic Sequence
gaagatcaga

SEQ ID NO: 6428 - DNA, 10 bp, Artificial Sequence
  Synthetic Sequence
acccttatcc

SEQ ID NO: 6429 - DNA, 10 bp, Artificial Sequence
  Synthetic Sequence
gcgtgtcacg

SEQ ID NO: 6430 - DNA, 10 bp, Artificial Sequence
  Synthetic Sequence
ggaattgttg

SEQ ID NO: 6431 - DNA, 10 bp, Artificial Sequence
  Synthetic Sequence
ggcaggtcat

SEQ ID NO: 6432 - DNA, 10 bp, Artificial Sequence
  Synthetic Sequence
agattgctac

SEQ ID NO: 6433 - DNA, 10 bp, Artificial Sequence
  Synthetic Sequence
aagtactcgt

SEQ ID NO: 6434 - DNA, 10 bp, Artificial Sequence
  Synthetic Sequence
cagttatgac

SEQ ID NO: 6435 - DNA, 10 bp, Artificial Sequence
  Synthetic Sequence
gctcccaatt

SEQ ID NO: 6436 - DNA, 10 bp, Artificial Sequence
  Synthetic Sequence
cgcagatcaa

SEQ ID NO: 6437 - DNA, 10 bp, Artificial Sequence
  Synthetic Sequence
gaaggatgca

SEQ ID NO: 6438 - DNA, 10 bp, Artificial Sequence
  Synthetic Sequence
ttctccgcgt

SEQ ID NO: 6439 - DNA, 10 bp, Artificial Sequence
  Synthetic Sequence
aatgacaggc

SEQ ID NO: 6440 - DNA, 10 bp, Artificial Sequence
  Synthetic Sequence
gtccctttct

SEQ ID NO: 6441 - DNA, 10 bp, Artificial Sequence
  Synthetic Sequence
gttaatcaga

SEQ ID NO: 6442 - DNA, 10 bp, Artificial Sequence
  Synthetic Sequence
tccttcgttg

SEQ ID NO: 6443 - DNA, 10 bp, Artificial Sequence
  Synthetic Sequence
actcgaaact

SEQ ID NO: 6444 - DNA, 10 bp, Artificial Sequence
  Synthetic Sequence
gtccgtgtcc

SEQ ID NO: 6445 - DNA, 10 bp, Artificial Sequence
  Synthetic Sequence
tatagacgat

SEQ ID NO: 6446 - DNA, 10 bp, Artificial Sequence
  Synthetic Sequence
tgacgccagc

SEQ ID NO: 6447 - DNA, 10 bp, Artificial Sequence
  Synthetic Sequence
ccaacaaggc

SEQ ID NO: 6448 - DNA, 10 bp, Artificial Sequence
  Synthetic Sequence
ttagccatcc

SEQ ID NO: 6449 - DNA, 10 bp, Artificial Sequence
  Synthetic Sequence
acgtgataaa

SEQ ID NO: 6450 - DNA, 10 bp, Artificial Sequence
  Synthetic Sequence
gactgctaat

SEQ ID NO: 6451 - DNA, 10 bp, Artificial Sequence
  Synthetic Sequence
gataaacggc

SEQ ID NO: 6452 - DNA, 10 bp, Artificial Sequence
  Synthetic Sequence
agagaacgat

SEQ ID NO: 6453 - DNA, 10 bp, Artificial Sequence
  Synthetic Sequence
cgctccgtac

SEQ ID NO: 6454 - DNA, 10 bp, Artificial Sequence
  Synthetic Sequence
gcgaacagat

SEQ ID NO: 6455 - DNA, 10 bp, Artificial Sequence
  Synthetic Sequence
cgactcacac

SEQ ID NO: 6456 - DNA, 10 bp, Artificial Sequence
  Synthetic Sequence
tggacgatgt

SEQ ID NO: 6457 - DNA, 10 bp, Artificial Sequence
  Synthetic Sequence
gcaagcatat

SEQ ID NO: 6458 - DNA, 10 bp, Artificial Sequence
  Synthetic Sequence
gtacaaaggg

SEQ ID NO: 6459 - DNA, 10 bp, Artificial Sequence
  Synthetic Sequence
gaatttcaaa

SEQ ID NO: 6460 - DNA, 10 bp, Artificial Sequence
  Synthetic Sequence
ttcacagaga

SEQ ID NO: 6461 - DNA, 10 bp, Artificial Sequence
  Synthetic Sequence
ggacttgagc

SEQ ID NO: 6462 - DNA, 10 bp, Artificial Sequence
  Synthetic Sequence
tataattcgt

SEQ ID NO: 6463 - DNA, 10 bp, Artificial Sequence
  Synthetic Sequence
agtactattt

SEQ ID NO: 6464 - DNA, 10 bp, Artificial Sequence
  Synthetic Sequence
ccgctgtact

SEQ ID NO: 6465 - DNA, 10 bp, Artificial Sequence
  Synthetic Sequence
cacggtctgg

SEQ ID NO: 6466 - DNA, 10 bp, Artificial Sequence
  Synthetic Sequence
cggcattacg

SEQ ID NO: 6467 - DNA, 10 bp, Artificial Sequence
  Synthetic Sequence
aggcgttgga

SEQ ID NO: 6468 - DNA, 10 bp, Artificial Sequence
  Synthetic Sequence
tgtttgcgga

SEQ ID NO: 6469 - DNA, 10 bp, Artificial Sequence
  Synthetic Sequence
gagggcgttg

SEQ ID NO: 6470 - DNA, 10 bp, Artificial Sequence
  Synthetic Sequence
cattcagccc

SEQ ID NO: 6471 - DNA, 10 bp, Artificial Sequence
  Synthetic Sequence
cgtctccggt

SEQ ID NO: 6472 - DNA, 10 bp, Artificial Sequence
  Synthetic Sequence
ctgtgtgtac

SEQ ID NO: 6473 - DNA, 10 bp, Artificial Sequence
  Synthetic Sequence
ttcatatgtg

SEQ ID NO: 6474 - DNA, 10 bp, Artificial Sequence
  Synthetic Sequence
taatgtactc

SEQ ID NO: 6475 - DNA, 10 bp, Artificial Sequence
  Synthetic Sequence
ttgtgataat

SEQ ID NO: 6476 - DNA, 10 bp, Artificial Sequence
  Synthetic Sequence
gtatcctaac

SEQ ID NO: 6477 - DNA, 10 bp, Artificial Sequence
  Synthetic Sequence
ccaatcggcg

SEQ ID NO: 6478 - DNA, 10 bp, Artificial Sequence
  Synthetic Sequence
tactgttgaa

SEQ ID NO: 6479 - DNA, 10 bp, Artificial Sequence
  Synthetic Sequence
tcggctgaca

SEQ ID NO: 6480 - DNA, 10 bp, Artificial Sequence
  Synthetic Sequence
ttgtaccctg

SEQ ID NO: 6481 - DNA, 10 bp, Artificial Sequence
  Synthetic Sequence
ctaagaagtc

SEQ ID NO: 6482 - DNA, 10 bp, Artificial Sequence
  Synthetic Sequence
tgtcgtataa

SEQ ID NO: 6483 - DNA, 10 bp, Artificial Sequence
  Synthetic Sequence
cggaccgagt

SEQ ID NO: 6484 - DNA, 10 bp, Artificial Sequence
  Synthetic Sequence
taaacccggg

SEQ ID NO: 6485 - DNA, 10 bp, Artificial Sequence
  Synthetic Sequence
taactcgctg

SEQ ID NO: 6486 - DNA, 10 bp, Artificial Sequence
  Synthetic Sequence
cgctaagagg

SEQ ID NO: 6487 - DNA, 10 bp, Artificial Sequence
  Synthetic Sequence
tctaagtgac

SEQ ID NO: 6488 - DNA, 10 bp, Artificial Sequence
  Synthetic Sequence
cggttattag

SEQ ID NO: 6489 - DNA, 10 bp, Artificial Sequence
  Synthetic Sequence
actgcggcat

SEQ ID NO: 6490 - DNA, 10 bp, Artificial Sequence
  Synthetic Sequence
tgcttacgcc

SEQ ID NO: 6491 - DNA, 10 bp, Artificial Sequence
  Synthetic Sequence
tgcctctcct

SEQ ID NO: 6492 - DNA, 10 bp, Artificial Sequence
  Synthetic Sequence
cttacccatc

SEQ ID NO: 6493 - DNA, 10 bp, Artificial Sequence
  Synthetic Sequence
tcagactgcc

SEQ ID NO: 6494 - DNA, 10 bp, Artificial Sequence
  Synthetic Sequence
aagagtgcat

SEQ ID NO: 6495 - DNA, 10 bp, Artificial Sequence
  Synthetic Sequence
tgttgtccca

SEQ ID NO: 6496 - DNA, 10 bp, Artificial Sequence
  Synthetic Sequence
tcgcctttaa

SEQ ID NO: 6497 - DNA, 10 bp, Artificial Sequence
  Synthetic Sequence
ctcctagagc

SEQ ID NO: 6498 - DNA, 10 bp, Artificial Sequence
  Synthetic Sequence
ccactactca

SEQ ID NO: 6499 - DNA, 10 bp, Artificial Sequence
  Synthetic Sequence
atgaaaccgt

SEQ ID NO: 6500 - DNA, 10 bp, Artificial Sequence
  Synthetic Sequence
attgggcgtt

SEQ ID NO: 6501 - DNA, 10 bp, Artificial Sequence
  Synthetic Sequence
gtcgctcgct

SEQ ID NO: 6502 - DNA, 10 bp, Artificial Sequence
  Synthetic Sequence
cggctatacc

SEQ ID NO: 6503 - DNA, 10 bp, Artificial Sequence
  Synthetic Sequence
acgcaacacc

SEQ ID NO: 6504 - DNA, 10 bp, Artificial Sequence
  Synthetic Sequence
agtcaagcgt

SEQ ID NO: 6505 - DNA, 10 bp, Artificial Sequence
  Synthetic Sequence
tgacgctccc

SEQ ID NO: 6506 - DNA, 10 bp, Artificial Sequence
  Synthetic Sequence
caacgaatga

SEQ ID NO: 6507 - DNA, 10 bp, Artificial Sequence
  Synthetic Sequence
tgtgcccttt

SEQ ID NO: 6508 - DNA, 10 bp, Artificial Sequence
  Synthetic Sequence
cgatctactt

SEQ ID NO: 6509 - DNA, 10 bp, Artificial Sequence
  Synthetic Sequence
ccgctacgac

SEQ ID NO: 6510 - DNA, 10 bp, Artificial Sequence
  Synthetic Sequence
ttgcaatatc

SEQ ID NO: 6511 - DNA, 10 bp, Artificial Sequence
  Synthetic Sequence
gaggttccca

SEQ ID NO: 6512 - DNA, 10 bp, Artificial Sequence
  Synthetic Sequence
ccaaaggtat

SEQ ID NO: 6513 - DNA, 10 bp, Artificial Sequence
  Synthetic Sequence
cggcttcttt

SEQ ID NO: 6514 - DNA, 10 bp, Artificial Sequence
  Synthetic Sequence
aattcaaaca

SEQ ID NO: 6515 - DNA, 10 bp, Artificial Sequence
  Synthetic Sequence
ttcactccag

SEQ ID NO: 6516 - DNA, 10 bp, Artificial Sequence
  Synthetic Sequence
tcgtcaacac

SEQ ID NO: 6517 - DNA, 10 bp, Artificial Sequence
  Synthetic Sequence
taccttcgtt

SEQ ID NO: 6518 - DNA, 10 bp, Artificial Sequence
  Synthetic Sequence
cgctacaccg

SEQ ID NO: 6519 - DNA, 10 bp, Artificial Sequence
  Synthetic Sequence
atactcagca

SEQ ID NO: 6520 - DNA, 10 bp, Artificial Sequence
  Synthetic Sequence
agagacggac

SEQ ID NO: 6521 - DNA, 10 bp, Artificial Sequence
  Synthetic Sequence
ccacaatggg

SEQ ID NO: 6522 - DNA, 10 bp, Artificial Sequence
  Synthetic Sequence
catgcggttc

SEQ ID NO: 6523 - DNA, 10 bp, Artificial Sequence
  Synthetic Sequence
gttcctacta

SEQ ID NO: 6524 - DNA, 10 bp, Artificial Sequence
  Synthetic Sequence
gagcatcatc

SEQ ID NO: 6525 - DNA, 10 bp, Artificial Sequence
  Synthetic Sequence
gccgcattgt

SEQ ID NO: 6526 - DNA, 10 bp, Artificial Sequence
  Synthetic Sequence
gatgaacagg

SEQ ID NO: 6527 - DNA, 10 bp, Artificial Sequence
  Synthetic Sequence
atgctcaggg

SEQ ID NO: 6528 - DNA, 10 bp, Artificial Sequence
  Synthetic Sequence
cctagcgaga

SEQ ID NO: 6529 - DNA, 10 bp, Artificial Sequence
  Synthetic Sequence
ccacttgcag

SEQ ID NO: 6530 - DNA, 10 bp, Artificial Sequence
  Synthetic Sequence
tgcagaagag

SEQ ID NO: 6531 - DNA, 10 bp, Artificial Sequence
  Synthetic Sequence
tggtcgatta

SEQ ID NO: 6532 - DNA, 10 bp, Artificial Sequence
  Synthetic Sequence
gcaatattcg

SEQ ID NO: 6533 - DNA, 10 bp, Artificial Sequence
  Synthetic Sequence
gggctcgtag

SEQ ID NO: 6534 - DNA, 10 bp, Artificial Sequence
  Synthetic Sequence
gataactacg

SEQ ID NO: 6535 - DNA, 10 bp, Artificial Sequence
  Synthetic Sequence
ggctcggttg

SEQ ID NO: 6536 - DNA, 10 bp, Artificial Sequence
  Synthetic Sequence
attcatatga

SEQ ID NO: 6537 - DNA, 10 bp, Artificial Sequence
  Synthetic Sequence
gacttgccgg

SEQ ID NO: 6538 - DNA, 10 bp, Artificial Sequence
  Synthetic Sequence
ttcgagtggt

SEQ ID NO: 6539 - DNA, 10 bp, Artificial Sequence
  Synthetic Sequence
tgacccattt

SEQ ID NO: 6540 - DNA, 10 bp, Artificial Sequence
  Synthetic Sequence
gcgcatacta

SEQ ID NO: 6541 - DNA, 10 bp, Artificial Sequence
  Synthetic Sequence
cgttgacgcg

SEQ ID NO: 6542 - DNA, 10 bp, Artificial Sequence
  Synthetic Sequence
gccgatcgac

SEQ ID NO: 6543 - DNA, 10 bp, Artificial Sequence
  Synthetic Sequence
attgcctagt

SEQ ID NO: 6544 - DNA, 10 bp, Artificial Sequence
  Synthetic Sequence
ctgaacccgg

SEQ ID NO: 6545 - DNA, 10 bp, Artificial Sequence
  Synthetic Sequence
ttaggttctc

SEQ ID NO: 6546 - DNA, 10 bp, Artificial Sequence
  Synthetic Sequence
tggcaggcct

SEQ ID NO: 6547 - DNA, 10 bp, Artificial Sequence
  Synthetic Sequence
ttgtttggtt

SEQ ID NO: 6548 - DNA, 10 bp, Artificial Sequence
  Synthetic Sequence
agtaaagatg

SEQ ID NO: 6549 - DNA, 10 bp, Artificial Sequence
  Synthetic Sequence
ccaagtaaga

SEQ ID NO: 6550 - DNA, 10 bp, Artificial Sequence
  Synthetic Sequence
atagatcaag

SEQ ID NO: 6551 - DNA, 10 bp, Artificial Sequence
  Synthetic Sequence
ggatggtgga

SEQ ID NO: 6552 - DNA, 10 bp, Artificial Sequence
  Synthetic Sequence
tggcctgtta

SEQ ID NO: 6553 - DNA, 10 bp, Artificial Sequence
  Synthetic Sequence
aagggccgag

SEQ ID NO: 6554 - DNA, 10 bp, Artificial Sequence
  Synthetic Sequence
ataaacgtat

SEQ ID NO: 6555 - DNA, 10 bp, Artificial Sequence
  Synthetic Sequence
tattgagtgg

SEQ ID NO: 6556 - DNA, 10 bp, Artificial Sequence
  Synthetic Sequence
agcctagtcc

SEQ ID NO: 6557 - DNA, 10 bp, Artificial Sequence
  Synthetic Sequence
cgacgatgga

SEQ ID NO: 6558 - DNA, 10 bp, Artificial Sequence
  Synthetic Sequence
atgggacggg

SEQ ID NO: 6559 - DNA, 10 bp, Artificial Sequence
  Synthetic Sequence
tctcctaact

SEQ ID NO: 6560 - DNA, 10 bp, Artificial Sequence
  Synthetic Sequence
ggaatttaag

SEQ ID NO: 6561 - DNA, 10 bp, Artificial Sequence
  Synthetic Sequence
aattacaacc

SEQ ID NO: 6562 - DNA, 10 bp, Artificial Sequence
  Synthetic Sequence
tcctccaatg

SEQ ID NO: 6563 - DNA, 10 bp, Artificial Sequence
  Synthetic Sequence
tgtctaaatt

SEQ ID NO: 6564 - DNA, 10 bp, Artificial Sequence
  Synthetic Sequence
cgctcaggct

SEQ ID NO: 6565 - DNA, 10 bp, Artificial Sequence
  Synthetic Sequence
tcttactaaa

SEQ ID NO: 6566 - DNA, 10 bp, Artificial Sequence
  Synthetic Sequence
atcggcccag

SEQ ID NO: 6567 - DNA, 10 bp, Artificial Sequence
  Synthetic Sequence
gtgacttcgg

SEQ ID NO: 6568 - DNA, 10 bp, Artificial Sequence
  Synthetic Sequence
tgcataaggt

SEQ ID NO: 6569 - DNA, 10 bp, Artificial Sequence
  Synthetic Sequence
ctgcttccaa

SEQ ID NO: 6570 - DNA, 10 bp, Artificial Sequence
  Synthetic Sequence
tccatctttc

SEQ ID NO: 6571 - DNA, 10 bp, Artificial Sequence
  Synthetic Sequence
atagcaaagc

SEQ ID NO: 6572 - DNA, 10 bp, Artificial Sequence
  Synthetic Sequence
cctaggcgca

SEQ ID NO: 6573 - DNA, 10 bp, Artificial Sequence
  Synthetic Sequence
cgaccagaaa

SEQ ID NO: 6574 - DNA, 10 bp, Artificial Sequence
  Synthetic Sequence
atcctgttta

SEQ ID NO: 6575 - DNA, 10 bp, Artificial Sequence
  Synthetic Sequence
tatcacggac

SEQ ID NO: 6576 - DNA, 10 bp, Artificial Sequence
  Synthetic Sequence
ccttcgccgt

SEQ ID NO: 6577 - DNA, 10 bp, Artificial Sequence
  Synthetic Sequence
ctaccggtag

SEQ ID NO: 6578 - DNA, 10 bp, Artificial Sequence
  Synthetic Sequence
ccgaggttct

SEQ ID NO: 6579 - DNA, 10 bp, Artificial Sequence
  Synthetic Sequence
aatgtgatgg

SEQ ID NO: 6580 - DNA, 10 bp, Artificial Sequence
  Synthetic Sequence
ttcctcctta

SEQ ID NO: 6581 - DNA, 10 bp, Artificial Sequence
  Synthetic Sequence
gagagcgatc

SEQ ID NO: 6582 - DNA, 10 bp, Artificial Sequence
  Synthetic Sequence
ttccggtcgg

SEQ ID NO: 6583 - DNA, 10 bp, Artificial Sequence
  Synthetic Sequence
ggaacaatgc

SEQ ID NO: 6584 - DNA, 10 bp, Artificial Sequence
  Synthetic Sequence
tcgcaagggt

SEQ ID NO: 6585 - DNA, 10 bp, Artificial Sequence
  Synthetic Sequence
attcgggctc

SEQ ID NO: 6586 - DNA, 10 bp, Artificial Sequence
  Synthetic Sequence
ttcgtgcggg

SEQ ID NO: 6587 - DNA, 10 bp, Artificial Sequence
  Synthetic Sequence
accaatttga

SEQ ID NO: 6588 - DNA, 10 bp, Artificial Sequence
  Synthetic Sequence
cactgttagg

SEQ ID NO: 6589 - DNA, 10 bp, Artificial Sequence
  Synthetic Sequence
aattcgggac

SEQ ID NO: 6590 - DNA, 10 bp, Artificial Sequence
  Synthetic Sequence
tctgatgaaa

SEQ ID NO: 6591 - DNA, 10 bp, Artificial Sequence
  Synthetic Sequence
gctgctgagg

SEQ ID NO: 6592 - DNA, 10 bp, Artificial Sequence
  Synthetic Sequence
gacgtccatg

SEQ ID NO: 6593 - DNA, 10 bp, Artificial Sequence
  Synthetic Sequence
taggcgcgtc

SEQ ID NO: 6594 - DNA, 10 bp, Artificial Sequence
  Synthetic Sequence
tttaccgcgc

SEQ ID NO: 6595 - DNA, 10 bp, Artificial Sequence
  Synthetic Sequence
atcagaatgc

SEQ ID NO: 6596 - DNA, 10 bp, Artificial Sequence
  Synthetic Sequence
agctcgtacc

SEQ ID NO: 6597 - DNA, 10 bp, Artificial Sequence
  Synthetic Sequence
tcatggaacg

SEQ ID NO: 6598 - DNA, 10 bp, Artificial Sequence
  Synthetic Sequence
gcgtcagtga

SEQ ID NO: 6599 - DNA, 10 bp, Artificial Sequence
  Synthetic Sequence
gaaccgcggt

SEQ ID NO: 6600 - DNA, 10 bp, Artificial Sequence
  Synthetic Sequence
gttcgtttac

SEQ ID NO: 6601 - DNA, 10 bp, Artificial Sequence
  Synthetic Sequence
cctgtcctcg

SEQ ID NO: 6602 - DNA, 10 bp, Artificial Sequence
  Synthetic Sequence
ataattcgga

SEQ ID NO: 6603 - DNA, 10 bp, Artificial Sequence
  Synthetic Sequence
ttacgccttt

SEQ ID NO: 6604 - DNA, 10 bp, Artificial Sequence
  Synthetic Sequence
tccaatccgg

SEQ ID NO: 6605 - DNA, 10 bp, Artificial Sequence
  Synthetic Sequence
tagacgaggg

SEQ ID NO: 6606 - DNA, 10 bp, Artificial Sequence
  Synthetic Sequence
ccgtgggtca

SEQ ID NO: 6607 - DNA, 10 bp, Artificial Sequence
  Synthetic Sequence
tgtaagaggc

SEQ ID NO: 6608 - DNA, 10 bp, Artificial Sequence
  Synthetic Sequence
actcaggtgc

SEQ ID NO: 6609 - DNA, 10 bp, Artificial Sequence
  Synthetic Sequence
gggctgttaa

SEQ ID NO: 6610 - DNA, 10 bp, Artificial Sequence
  Synthetic Sequence
acgttaggat

SEQ ID NO: 6611 - DNA, 10 bp, Artificial Sequence
  Synthetic Sequence
ctcggcgtag

SEQ ID NO: 6612 - DNA, 10 bp, Artificial Sequence
  Synthetic Sequence
tgcaaggcgt

SEQ ID NO: 6613 - DNA, 10 bp, Artificial Sequence
  Synthetic Sequence
ttccatccca

SEQ ID NO: 6614 - DNA, 10 bp, Artificial Sequence
  Synthetic Sequence
gcatgattta

SEQ ID NO: 6615 - DNA, 10 bp, Artificial Sequence
  Synthetic Sequence
tcgtgaatat

SEQ ID NO: 6616 - DNA, 10 bp, Artificial Sequence
  Synthetic Sequence
tgaggtcttt

SEQ ID NO: 6617 - DNA, 10 bp, Artificial Sequence
  Synthetic Sequence
ctgcgctgga

SEQ ID NO: 6618 - DNA, 10 bp, Artificial Sequence
  Synthetic Sequence
ttccgatagt

SEQ ID NO: 6619 - DNA, 10 bp, Artificial Sequence
  Synthetic Sequence
ttcacgctgt

SEQ ID NO: 6620 - DNA, 10 bp, Artificial Sequence
  Synthetic Sequence
acaaatgatc

SEQ ID NO: 6621 - DNA, 10 bp, Artificial Sequence
  Synthetic Sequence
cctcttgtct

SEQ ID NO: 6622 - DNA, 10 bp, Artificial Sequence
  Synthetic Sequence
tcggctatag

SEQ ID NO: 6623 - DNA, 10 bp, Artificial Sequence
  Synthetic Sequence
ggtgtgatgc

SEQ ID NO: 6624 - DNA, 10 bp, Artificial Sequence
  Synthetic Sequence
gtattgattc

SEQ ID NO: 6625 - DNA, 10 bp, Artificial Sequence
  Synthetic Sequence
tgctgcgact

SEQ ID NO: 6626 - DNA, 10 bp, Artificial Sequence
  Synthetic Sequence
gaaccctgac

SEQ ID NO: 6627 - DNA, 10 bp, Artificial Sequence
  Synthetic Sequence
caaacggtca

SEQ ID NO: 6628 - DNA, 10 bp, Artificial Sequence
  Synthetic Sequence
aggcaaacga

SEQ ID NO: 6629 - DNA, 10 bp, Artificial Sequence
  Synthetic Sequence
cggaaccaat

SEQ ID NO: 6630 - DNA, 10 bp, Artificial Sequence
  Synthetic Sequence
ggcttagtta

SEQ ID NO: 6631 - DNA, 10 bp, Artificial Sequence
  Synthetic Sequence
actccacgct

SEQ ID NO: 6632 - DNA, 10 bp, Artificial Sequence
  Synthetic Sequence
ggtcgacgaa

SEQ ID NO: 6633 - DNA, 10 bp, Artificial Sequence
  Synthetic Sequence
tgcctactgc

SEQ ID NO: 6634 - DNA, 10 bp, Artificial Sequence
  Synthetic Sequence
tggtcgccat

SEQ ID NO: 6635 - DNA, 10 bp, Artificial Sequence
  Synthetic Sequence
gcggtctatg

SEQ ID NO: 6636 - DNA, 10 bp, Artificial Sequence
  Synthetic Sequence
cttcccagta

SEQ ID NO: 6637 - DNA, 10 bp, Artificial Sequence
  Synthetic Sequence
cgtctcagcg

SEQ ID NO: 6638 - DNA, 10 bp, Artificial Sequence
  Synthetic Sequence
gttattaaac

SEQ ID NO: 6639 - DNA, 10 bp, Artificial Sequence
  Synthetic Sequence
gtccacccga

SEQ ID NO: 6640 - DNA, 10 bp, Artificial Sequence
  Synthetic Sequence
aactaaatat

SEQ ID NO: 6641 - DNA, 10 bp, Artificial Sequence
  Synthetic Sequence
aatcgaaccc

SEQ ID NO: 6642 - DNA, 10 bp, Artificial Sequence
  Synthetic Sequence
acgaggctgc

SEQ ID NO: 6643 - DNA, 10 bp, Artificial Sequence
  Synthetic Sequence
tggatcaaca

SEQ ID NO: 6644 - DNA, 10 bp, Artificial Sequence
  Synthetic Sequence
ccaccgggat

SEQ ID NO: 6645 - DNA, 10 bp, Artificial Sequence
  Synthetic Sequence
cgcggcaatc

SEQ ID NO: 6646 - DNA, 10 bp, Artificial Sequence
  Synthetic Sequence
cgtgtaccac

SEQ ID NO: 6647 - DNA, 10 bp, Artificial Sequence
  Synthetic Sequence
gcacacttgc

SEQ ID NO: 6648 - DNA, 10 bp, Artificial Sequence
  Synthetic Sequence
attacgaaat

SEQ ID NO: 6649 - DNA, 10 bp, Artificial Sequence
  Synthetic Sequence
tataaactga

SEQ ID NO: 6650 - DNA, 10 bp, Artificial Sequence
  Synthetic Sequence
agggcctcct

SEQ ID NO: 6651 - DNA, 10 bp, Artificial Sequence
  Synthetic Sequence
aaggacgaga

SEQ ID NO: 6652 - DNA, 10 bp, Artificial Sequence
  Synthetic Sequence
gctgctagga

SEQ ID NO: 6653 - DNA, 10 bp, Artificial Sequence
  Synthetic Sequence
tctttgtctt

SEQ ID NO: 6654 - DNA, 10 bp, Artificial Sequence
  Synthetic Sequence
gatcttgggc

SEQ ID NO: 6655 - DNA, 10 bp, Artificial Sequence
  Synthetic Sequence
acagtgtaca

SEQ ID NO: 6656 - DNA, 10 bp, Artificial Sequence
  Synthetic Sequence
tacgactacc

SEQ ID NO: 6657 - DNA, 10 bp, Artificial Sequence
  Synthetic Sequence
gactatcaat

SEQ ID NO: 6658 - DNA, 10 bp, Artificial Sequence
  Synthetic Sequence
ttcatcatcg

SEQ ID NO: 6659 - DNA, 10 bp, Artificial Sequence
  Synthetic Sequence
tatcatctgc

SEQ ID NO: 6660 - DNA, 10 bp, Artificial Sequence
  Synthetic Sequence
gcgctaatcg

SEQ ID NO: 6661 - DNA, 10 bp, Artificial Sequence
  Synthetic Sequence
gggtactccg

SEQ ID NO: 6662 - DNA, 10 bp, Artificial Sequence
  Synthetic Sequence
tgggataata

SEQ ID NO: 6663 - DNA, 10 bp, Artificial Sequence
  Synthetic Sequence
taggcaaacg

SEQ ID NO: 6664 - DNA, 10 bp, Artificial Sequence
  Synthetic Sequence
cgttcaggac

SEQ ID NO: 6665 - DNA, 10 bp, Artificial Sequence
  Synthetic Sequence
cacctataca

SEQ ID NO: 6666 - DNA, 10 bp, Artificial Sequence
  Synthetic Sequence
aacttcatca

SEQ ID NO: 6667 - DNA, 10 bp, Artificial Sequence
  Synthetic Sequence
cagtaccatc

SEQ ID NO: 6668 - DNA, 10 bp, Artificial Sequence
  Synthetic Sequence
tcatatcgaa

SEQ ID NO: 6669 - DNA, 10 bp, Artificial Sequence
  Synthetic Sequence
gtacaaattc

SEQ ID NO: 6670 - DNA, 10 bp, Artificial Sequence
  Synthetic Sequence
tttgaagaga

SEQ ID NO: 6671 - DNA, 10 bp, Artificial Sequence
  Synthetic Sequence
atcaggagag

SEQ ID NO: 6672 - DNA, 10 bp, Artificial Sequence
  Synthetic Sequence
gttacgcacc

SEQ ID NO: 6673 - DNA, 10 bp, Artificial Sequence
  Synthetic Sequence
agagtccgga

SEQ ID NO: 6674 - DNA, 10 bp, Artificial Sequence
  Synthetic Sequence
cggtggaagt

SEQ ID NO: 6675 - DNA, 10 bp, Artificial Sequence
  Synthetic Sequence
agagcctatc

SEQ ID NO: 6676 - DNA, 10 bp, Artificial Sequence
  Synthetic Sequence
gattgatcag

SEQ ID NO: 6677 - DNA, 10 bp, Artificial Sequence
  Synthetic Sequence
gcgcgagtat

SEQ ID NO: 6678 - DNA, 10 bp, Artificial Sequence
  Synthetic Sequence
tgccaggtcc

SEQ ID NO: 6679 - DNA, 10 bp, Artificial Sequence
  Synthetic Sequence
ctgggtgacg

SEQ ID NO: 6680 - DNA, 10 bp, Artificial Sequence
  Synthetic Sequence
aagcatagcc

SEQ ID NO: 6681 - DNA, 10 bp, Artificial Sequence
  Synthetic Sequence
caaacaggga

SEQ ID NO: 6682 - DNA, 10 bp, Artificial Sequence
  Synthetic Sequence
aaggcatata

SEQ ID NO: 6683 - DNA, 10 bp, Artificial Sequence
  Synthetic Sequence
tgtccaccgg

SEQ ID NO: 6684 - DNA, 10 bp, Artificial Sequence
  Synthetic Sequence
tagtcgaagt

SEQ ID NO: 6685 - DNA, 10 bp, Artificial Sequence
  Synthetic Sequence
ttcacgaatc

SEQ ID NO: 6686 - DNA, 10 bp, Artificial Sequence
  Synthetic Sequence
ggaaggaaat

SEQ ID NO: 6687 - DNA, 10 bp, Artificial Sequence
  Synthetic Sequence
cggtgtttgt

SEQ ID NO: 6688 - DNA, 10 bp, Artificial Sequence
  Synthetic Sequence
cactcccaca

SEQ ID NO: 6689 - DNA, 10 bp, Artificial Sequence
  Synthetic Sequence
ctgattgatt

SEQ ID NO: 6690 - DNA, 10 bp, Artificial Sequence
  Synthetic Sequence
agttcgtgcg

SEQ ID NO: 6691 - DNA, 10 bp, Artificial Sequence
  Synthetic Sequence
gtcctcaagc

SEQ ID NO: 6692 - DNA, 10 bp, Artificial Sequence
  Synthetic Sequence
ggccatgttc

SEQ ID NO: 6693 - DNA, 10 bp, Artificial Sequence
  Synthetic Sequence
cgcatggtgt

SEQ ID NO: 6694 - DNA, 10 bp, Artificial Sequence
  Synthetic Sequence
tcgactcgga

SEQ ID NO: 6695 - DNA, 10 bp, Artificial Sequence
  Synthetic Sequence
gacgggtgtc

SEQ ID NO: 6696 - DNA, 10 bp, Artificial Sequence
  Synthetic Sequence
gtatgcaggg

SEQ ID NO: 6697 - DNA, 10 bp, Artificial Sequence
  Synthetic Sequence
tgttagtcca

SEQ ID NO: 6698 - DNA, 10 bp, Artificial Sequence
  Synthetic Sequence
accctgagga

SEQ ID NO: 6699 - DNA, 10 bp, Artificial Sequence
  Synthetic Sequence
ctcgtagctg

SEQ ID NO: 6700 - DNA, 10 bp, Artificial Sequence
  Synthetic Sequence
aggtgaaatg

SEQ ID NO: 6701 - DNA, 10 bp, Artificial Sequence
  Synthetic Sequence
tacaacaaac

SEQ ID NO: 6702 - DNA, 10 bp, Artificial Sequence
  Synthetic Sequence
cattcttctc

SEQ ID NO: 6703 - DNA, 10 bp, Artificial Sequence
  Synthetic Sequence
acaccagcga

SEQ ID NO: 6704 - DNA, 10 bp, Artificial Sequence
  Synthetic Sequence
ggaaacccag

SEQ ID NO: 6705 - DNA, 10 bp, Artificial Sequence
  Synthetic Sequence
agtagagccg

SEQ ID NO: 6706 - DNA, 10 bp, Artificial Sequence
  Synthetic Sequence
ttcaagcaac

SEQ ID NO: 6707 - DNA, 10 bp, Artificial Sequence
  Synthetic Sequence
gatcaccata

SEQ ID NO: 6708 - DNA, 10 bp, Artificial Sequence
  Synthetic Sequence
atatactagt

SEQ ID NO: 6709 - DNA, 10 bp, Artificial Sequence
  Synthetic Sequence
cttaaatagg

SEQ ID NO: 6710 - DNA, 10 bp, Artificial Sequence
  Synthetic Sequence
gtctcagcaa

SEQ ID NO: 6711 - DNA, 10 bp, Artificial Sequence
  Synthetic Sequence
cacttatgta

SEQ ID NO: 6712 - DNA, 10 bp, Artificial Sequence
  Synthetic Sequence
tgccctcacg

SEQ ID NO: 6713 - DNA, 10 bp, Artificial Sequence
  Synthetic Sequence
tcctttacag

SEQ ID NO: 6714 - DNA, 10 bp, Artificial Sequence
  Synthetic Sequence
tcgctacgct

SEQ ID NO: 6715 - DNA, 10 bp, Artificial Sequence
  Synthetic Sequence
cacgaacttc

SEQ ID NO: 6716 - DNA, 10 bp, Artificial Sequence
  Synthetic Sequence
taagcacaca

SEQ ID NO: 6717 - DNA, 10 bp, Artificial Sequence
  Synthetic Sequence
gtgcccacca

SEQ ID NO: 6718 - DNA, 10 bp, Artificial Sequence
  Synthetic Sequence
tctcggaagc

SEQ ID NO: 6719 - DNA, 10 bp, Artificial Sequence
  Synthetic Sequence
ggtttctgtg

SEQ ID NO: 6720 - DNA, 10 bp, Artificial Sequence
  Synthetic Sequence
gagagtagat

SEQ ID NO: 6721 - DNA, 10 bp, Artificial Sequence
  Synthetic Sequence
ggccacttcg

SEQ ID NO: 6722 - DNA, 10 bp, Artificial Sequence
  Synthetic Sequence
catcctctag

SEQ ID NO: 6723 - DNA, 10 bp, Artificial Sequence
  Synthetic Sequence
tatccgcttg

SEQ ID NO: 6724 - DNA, 10 bp, Artificial Sequence
  Synthetic Sequence
agtgttgatt

SEQ ID NO: 6725 - DNA, 10 bp, Artificial Sequence
  Synthetic Sequence
ccgaattgac

SEQ ID NO: 6726 - DNA, 10 bp, Artificial Sequence
  Synthetic Sequence
gtagaacgtt

SEQ ID NO: 6727 - DNA, 10 bp, Artificial Sequence
  Synthetic Sequence
tcgtttcaac

SEQ ID NO: 6728 - DNA, 10 bp, Artificial Sequence
  Synthetic Sequence
tagctatgca

SEQ ID NO: 6729 - DNA, 10 bp, Artificial Sequence
  Synthetic Sequence
gtcccaaact

SEQ ID NO: 6730 - DNA, 10 bp, Artificial Sequence
  Synthetic Sequence
ctttgcagct

SEQ ID NO: 6731 - DNA, 10 bp, Artificial Sequence
  Synthetic Sequence
tggatttgac

SEQ ID NO: 6732 - DNA, 10 bp, Artificial Sequence
  Synthetic Sequence
ttaggtttgt

SEQ ID NO: 6733 - DNA, 10 bp, Artificial Sequence
  Synthetic Sequence
tccactatgg

SEQ ID NO: 6734 - DNA, 10 bp, Artificial Sequence
  Synthetic Sequence
aaggaagcgg

SEQ ID NO: 6735 - DNA, 10 bp, Artificial Sequence
  Synthetic Sequence
ccatgtccga

SEQ ID NO: 6736 - DNA, 10 bp, Artificial Sequence
  Synthetic Sequence
cgcgattagt

SEQ ID NO: 6737 - DNA, 10 bp, Artificial Sequence
  Synthetic Sequence
cctttcacaa

SEQ ID NO: 6738 - DNA, 10 bp, Artificial Sequence
  Synthetic Sequence
ctcctcagcc

SEQ ID NO: 6739 - DNA, 10 bp, Artificial Sequence
  Synthetic Sequence
gtggactgtt

SEQ ID NO: 6740 - DNA, 10 bp, Artificial Sequence
  Synthetic Sequence
gtggtcaaga

SEQ ID NO: 6741 - DNA, 10 bp, Artificial Sequence
  Synthetic Sequence
tgtcgtcgtg

SEQ ID NO: 6742 - DNA, 10 bp, Artificial Sequence
  Synthetic Sequence
catagcaaag

SEQ ID NO: 6743 - DNA, 10 bp, Artificial Sequence
  Synthetic Sequence
gtgtacgaca

SEQ ID NO: 6744 - DNA, 10 bp, Artificial Sequence
  Synthetic Sequence
tctgcggata

SEQ ID NO: 6745 - DNA, 10 bp, Artificial Sequence
  Synthetic Sequence
aaatatagaa

SEQ ID NO: 6746 - DNA, 10 bp, Artificial Sequence
  Synthetic Sequence
tggattaccc

SEQ ID NO: 6747 - DNA, 10 bp, Artificial Sequence
  Synthetic Sequence
atactaatgg

SEQ ID NO: 6748 - DNA, 10 bp, Artificial Sequence
  Synthetic Sequence
aaggagagtt

SEQ ID NO: 6749 - DNA, 10 bp, Artificial Sequence
  Synthetic Sequence
agctcgcgac

SEQ ID NO: 6750 - DNA, 10 bp, Artificial Sequence
  Synthetic Sequence
ctcataaaca

SEQ ID NO: 6751 - DNA, 10 bp, Artificial Sequence
  Synthetic Sequence
caccgaggtc

SEQ ID NO: 6752 - DNA, 10 bp, Artificial Sequence
  Synthetic Sequence
ctggtaacta

SEQ ID NO: 6753 - DNA, 10 bp, Artificial Sequence
  Synthetic Sequence
attccctgcc

SEQ ID NO: 6754 - DNA, 10 bp, Artificial Sequence
  Synthetic Sequence
tttgcctgca

SEQ ID NO: 6755 - DNA, 10 bp, Artificial Sequence
  Synthetic Sequence
ctctttctca

SEQ ID NO: 6756 - DNA, 10 bp, Artificial Sequence
  Synthetic Sequence
gggaatcggc

SEQ ID NO: 6757 - DNA, 10 bp, Artificial Sequence
  Synthetic Sequence
acttgactgg

SEQ ID NO: 6758 - DNA, 10 bp, Artificial Sequence
  Synthetic Sequence
ctttgttcgt

SEQ ID NO: 6759 - DNA, 10 bp, Artificial Sequence
  Synthetic Sequence
caatgccgta

SEQ ID NO: 6760 - DNA, 10 bp, Artificial Sequence
  Synthetic Sequence
atacagctga

SEQ ID NO: 6761 - DNA, 10 bp, Artificial Sequence
  Synthetic Sequence
acatcctgag

SEQ ID NO: 6762 - DNA, 10 bp, Artificial Sequence
  Synthetic Sequence
tgatcctgtc

SEQ ID NO: 6763 - DNA, 10 bp, Artificial Sequence
  Synthetic Sequence
atctcccggc

SEQ ID NO: 6764 - DNA, 10 bp, Artificial Sequence
  Synthetic Sequence
cagcactgaa

SEQ ID NO: 6765 - DNA, 10 bp, Artificial Sequence
  Synthetic Sequence
tattgctttc

SEQ ID NO: 6766 - DNA, 10 bp, Artificial Sequence
  Synthetic Sequence
cgacagcaga

SEQ ID NO: 6767 - DNA, 10 bp, Artificial Sequence
  Synthetic Sequence
cgacaagccc

SEQ ID NO: 6768 - DNA, 10 bp, Artificial Sequence
  Synthetic Sequence
caacatgcct

SEQ ID NO: 6769 - DNA, 10 bp, Artificial Sequence
  Synthetic Sequence
cccgaaacct

SEQ ID NO: 6770 - DNA, 10 bp, Artificial Sequence
  Synthetic Sequence
tcggcacctg

SEQ ID NO: 6771 - DNA, 10 bp, Artificial Sequence
  Synthetic Sequence
tgtggattgc

SEQ ID NO: 6772 - DNA, 10 bp, Artificial Sequence
  Synthetic Sequence
atccctgagg

SEQ ID NO: 6773 - DNA, 10 bp, Artificial Sequence
  Synthetic Sequence
gtacttattg

SEQ ID NO: 6774 - DNA, 10 bp, Artificial Sequence
  Synthetic Sequence
agcaatcgag

SEQ ID NO: 6775 - DNA, 10 bp, Artificial Sequence
  Synthetic Sequence
atgacagagg

SEQ ID NO: 6776 - DNA, 10 bp, Artificial Sequence
  Synthetic Sequence
cggatccgca

SEQ ID NO: 6777 - DNA, 10 bp, Artificial Sequence
  Synthetic Sequence
ttgaaacgct

SEQ ID NO: 6778 - DNA, 10 bp, Artificial Sequence
  Synthetic Sequence
gcccatatgg

SEQ ID NO: 6779 - DNA, 10 bp, Artificial Sequence
  Synthetic Sequence
gataggcaca

SEQ ID NO: 6780 - DNA, 10 bp, Artificial Sequence
  Synthetic Sequence
cgttgttgaa

SEQ ID NO: 6781 - DNA, 10 bp, Artificial Sequence
  Synthetic Sequence
taatcaattc

SEQ ID NO: 6782 - DNA, 10 bp, Artificial Sequence
  Synthetic Sequence
accgggaacg

SEQ ID NO: 6783 - DNA, 10 bp, Artificial Sequence
  Synthetic Sequence
tcctgacaat

SEQ ID NO: 6784 - DNA, 10 bp, Artificial Sequence
  Synthetic Sequence
ttacgtgcta

SEQ ID NO: 6785 - DNA, 10 bp, Artificial Sequence
  Synthetic Sequence
aaatagctct

SEQ ID NO: 6786 - DNA, 10 bp, Artificial Sequence
  Synthetic Sequence
cgtcatcgtt

SEQ ID NO: 6787 - DNA, 10 bp, Artificial Sequence
  Synthetic Sequence
gcaaagcact

SEQ ID NO: 6788 - DNA, 10 bp, Artificial Sequence
  Synthetic Sequence
tcgggtctca

SEQ ID NO: 6789 - DNA, 10 bp, Artificial Sequence
  Synthetic Sequence
aggttcaaag

SEQ ID NO: 6790 - DNA, 10 bp, Artificial Sequence
  Synthetic Sequence
agactctagg

SEQ ID NO: 6791 - DNA, 10 bp, Artificial Sequence
  Synthetic Sequence
ccgtttagcg

SEQ ID NO: 6792 - DNA, 10 bp, Artificial Sequence
  Synthetic Sequence
atactgctct

SEQ ID NO: 6793 - DNA, 10 bp, Artificial Sequence
  Synthetic Sequence
tgttaccgct

SEQ ID NO: 6794 - DNA, 10 bp, Artificial Sequence
  Synthetic Sequence
gcctacggtg

SEQ ID NO: 6795 - DNA, 10 bp, Artificial Sequence
  Synthetic Sequence
tgagaggctc

SEQ ID NO: 6796 - DNA, 10 bp, Artificial Sequence
  Synthetic Sequence
aatccctaca

SEQ ID NO: 6797 - DNA, 10 bp, Artificial Sequence
  Synthetic Sequence
tggcagtgtt

SEQ ID NO: 6798 - DNA, 10 bp, Artificial Sequence
  Synthetic Sequence
acttgcattg

SEQ ID NO: 6799 - DNA, 10 bp, Artificial Sequence
  Synthetic Sequence
tgggcaagag

SEQ ID NO: 6800 - DNA, 10 bp, Artificial Sequence
  Synthetic Sequence
cgttactagt

SEQ ID NO: 6801 - DNA, 10 bp, Artificial Sequence
  Synthetic Sequence
tctccgtacc

SEQ ID NO: 6802 - DNA, 10 bp, Artificial Sequence
  Synthetic Sequence
cctaccttta

SEQ ID NO: 6803 - DNA, 10 bp, Artificial Sequence
  Synthetic Sequence
aagggagtgc

SEQ ID NO: 6804 - DNA, 10 bp, Artificial Sequence
  Synthetic Sequence
aaagcggagt

SEQ ID NO: 6805 - DNA, 10 bp, Artificial Sequence
  Synthetic Sequence
cctacgacct

SEQ ID NO: 6806 - DNA, 10 bp, Artificial Sequence
  Synthetic Sequence
tcaggtaggc

SEQ ID NO: 6807 - DNA, 10 bp, Artificial Sequence
  Synthetic Sequence
cctaagagcg

SEQ ID NO: 6808 - DNA, 10 bp, Artificial Sequence
  Synthetic Sequence
tacatctggg

SEQ ID NO: 6809 - DNA, 10 bp, Artificial Sequence
  Synthetic Sequence
atataatccc

SEQ ID NO: 6810 - DNA, 10 bp, Artificial Sequence
  Synthetic Sequence
tccttacgtt

SEQ ID NO: 6811 - DNA, 10 bp, Artificial Sequence
  Synthetic Sequence
ttgttcatca

SEQ ID NO: 6812 - DNA, 10 bp, Artificial Sequence
  Synthetic Sequence
ccgtcagtac

SEQ ID NO: 6813 - DNA, 10 bp, Artificial Sequence
  Synthetic Sequence
ttgccatctg

SEQ ID NO: 6814 - DNA, 10 bp, Artificial Sequence
  Synthetic Sequence
ggagtcagtg

SEQ ID NO: 6815 - DNA, 10 bp, Artificial Sequence
  Synthetic Sequence
atcacacgag

SEQ ID NO: 6816 - DNA, 10 bp, Artificial Sequence
  Synthetic Sequence
ttgggttagc

SEQ ID NO: 6817 - DNA, 10 bp, Artificial Sequence
  Synthetic Sequence
ctcattaccc

SEQ ID NO: 6818 - DNA, 10 bp, Artificial Sequence
  Synthetic Sequence
atgagagtaa

SEQ ID NO: 6819 - DNA, 10 bp, Artificial Sequence
  Synthetic Sequence
cgatgtattg

SEQ ID NO: 6820 - DNA, 10 bp, Artificial Sequence
  Synthetic Sequence
tagatcaaat

SEQ ID NO: 6821 - DNA, 10 bp, Artificial Sequence
  Synthetic Sequence
accagataac

SEQ ID NO: 6822 - DNA, 10 bp, Artificial Sequence
  Synthetic Sequence
taaacgctgc

SEQ ID NO: 6823 - DNA, 10 bp, Artificial Sequence
  Synthetic Sequence
cacatttgca

SEQ ID NO: 6824 - DNA, 10 bp, Artificial Sequence
  Synthetic Sequence
gagaagaggt

SEQ ID NO: 6825 - DNA, 10 bp, Artificial Sequence
  Synthetic Sequence
tcgagctgtt

SEQ ID NO: 6826 - DNA, 10 bp, Artificial Sequence
  Synthetic Sequence
cgagagcaat

SEQ ID NO: 6827 - DNA, 10 bp, Artificial Sequence
  Synthetic Sequence
aacgtccgcc

SEQ ID NO: 6828 - DNA, 10 bp, Artificial Sequence
  Synthetic Sequence
cgcgtgtgtc

SEQ ID NO: 6829 - DNA, 10 bp, Artificial Sequence
  Synthetic Sequence
tggtttgaga

SEQ ID NO: 6830 - DNA, 10 bp, Artificial Sequence
  Synthetic Sequence
catatggtga

SEQ ID NO: 6831 - DNA, 10 bp, Artificial Sequence
  Synthetic Sequence
catagggctc

SEQ ID NO: 6832 - DNA, 10 bp, Artificial Sequence
  Synthetic Sequence
gattcgaccg

SEQ ID NO: 6833 - DNA, 10 bp, Artificial Sequence
  Synthetic Sequence
tagtggttat

SEQ ID NO: 6834 - DNA, 10 bp, Artificial Sequence
  Synthetic Sequence
tgggtatgga

SEQ ID NO: 6835 - DNA, 10 bp, Artificial Sequence
  Synthetic Sequence
caggacgcct

SEQ ID NO: 6836 - DNA, 10 bp, Artificial Sequence
  Synthetic Sequence
cgctaggcga

SEQ ID NO: 6837 - DNA, 10 bp, Artificial Sequence
  Synthetic Sequence
gtaatggtgc

SEQ ID NO: 6838 - DNA, 10 bp, Artificial Sequence
  Synthetic Sequence
gtgatctgtg

SEQ ID NO: 6839 - DNA, 10 bp, Artificial Sequence
  Synthetic Sequence
tcacctcacc

SEQ ID NO: 6840 - DNA, 10 bp, Artificial Sequence
  Synthetic Sequence
taagttcaac

SEQ ID NO: 6841 - DNA, 10 bp, Artificial Sequence
  Synthetic Sequence
tttcttaagg

SEQ ID NO: 6842 - DNA, 10 bp, Artificial Sequence
  Synthetic Sequence
tcacgttcgc

SEQ ID NO: 6843 - DNA, 10 bp, Artificial Sequence
  Synthetic Sequence
cctgggagct

SEQ ID NO: 6844 - DNA, 10 bp, Artificial Sequence
  Synthetic Sequence
gagagtgttt

SEQ ID NO: 6845 - DNA, 10 bp, Artificial Sequence
  Synthetic Sequence
gtaggcggct

SEQ ID NO: 6846 - DNA, 10 bp, Artificial Sequence
  Synthetic Sequence
tacgaattgt

SEQ ID NO: 6847 - DNA, 10 bp, Artificial Sequence
  Synthetic Sequence
tagcgccctc

SEQ ID NO: 6848 - DNA, 10 bp, Artificial Sequence
  Synthetic Sequence
cagcccatta

SEQ ID NO: 6849 - DNA, 10 bp, Artificial Sequence
  Synthetic Sequence
cataacaagt

SEQ ID NO: 6850 - DNA, 10 bp, Artificial Sequence
  Synthetic Sequence
ccgtcgtagg

SEQ ID NO: 6851 - DNA, 10 bp, Artificial Sequence
  Synthetic Sequence
aaatgatcga

SEQ ID NO: 6852 - DNA, 10 bp, Artificial Sequence
  Synthetic Sequence
gcggatatgc

SEQ ID NO: 6853 - DNA, 10 bp, Artificial Sequence
  Synthetic Sequence
actacgtgcc

SEQ ID NO: 6854 - DNA, 10 bp, Artificial Sequence
  Synthetic Sequence
attaacgctg

SEQ ID NO: 6855 - DNA, 10 bp, Artificial Sequence
  Synthetic Sequence
accaataaat

SEQ ID NO: 6856 - DNA, 10 bp, Artificial Sequence
  Synthetic Sequence
gtcgcacaag

SEQ ID NO: 6857 - DNA, 10 bp, Artificial Sequence
  Synthetic Sequence
ttgtcggcaa

SEQ ID NO: 6858 - DNA, 10 bp, Artificial Sequence
  Synthetic Sequence
acttggatat

SEQ ID NO: 6859 - DNA, 10 bp, Artificial Sequence
  Synthetic Sequence
acactactgt

SEQ ID NO: 6860 - DNA, 10 bp, Artificial Sequence
  Synthetic Sequence
tccaaggtgc

SEQ ID NO: 6861 - DNA, 10 bp, Artificial Sequence
  Synthetic Sequence
ggcaagcctg

SEQ ID NO: 6862 - DNA, 10 bp, Artificial Sequence
  Synthetic Sequence
atgtttctga

SEQ ID NO: 6863 - DNA, 10 bp, Artificial Sequence
  Synthetic Sequence
cacgatggtg

SEQ ID NO: 6864 - DNA, 10 bp, Artificial Sequence
  Synthetic Sequence
caggattagg

SEQ ID NO: 6865 - DNA, 10 bp, Artificial Sequence
  Synthetic Sequence
ccctaacgcg

SEQ ID NO: 6866 - DNA, 10 bp, Artificial Sequence
  Synthetic Sequence
gaaatgggtg

SEQ ID NO: 6867 - DNA, 10 bp, Artificial Sequence
  Synthetic Sequence
atgtgtgaca

SEQ ID NO: 6868 - DNA, 10 bp, Artificial Sequence
  Synthetic Sequence
gccgctaaac

SEQ ID NO: 6869 - DNA, 10 bp, Artificial Sequence
  Synthetic Sequence
gtgtcaactc

SEQ ID NO: 6870 - DNA, 10 bp, Artificial Sequence
  Synthetic Sequence
ccctggatcc

SEQ ID NO: 6871 - DNA, 10 bp, Artificial Sequence
  Synthetic Sequence
tataaccagg

SEQ ID NO: 6872 - DNA, 10 bp, Artificial Sequence
  Synthetic Sequence
tgcttgtgtt

SEQ ID NO: 6873 - DNA, 10 bp, Artificial Sequence
  Synthetic Sequence
cgatttgata

SEQ ID NO: 6874 - DNA, 10 bp, Artificial Sequence
  Synthetic Sequence
gcttgtgccc

SEQ ID NO: 6875 - DNA, 10 bp, Artificial Sequence
  Synthetic Sequence
cgtgaagact

SEQ ID NO: 6876 - DNA, 10 bp, Artificial Sequence
  Synthetic Sequence
gcttcaacgg

SEQ ID NO: 6877 - DNA, 10 bp, Artificial Sequence
  Synthetic Sequence
accgacgtat

SEQ ID NO: 6878 - DNA, 10 bp, Artificial Sequence
  Synthetic Sequence
ctacttctta

SEQ ID NO: 6879 - DNA, 10 bp, Artificial Sequence
  Synthetic Sequence
ccaggaatcc

SEQ ID NO: 6880 - DNA, 10 bp, Artificial Sequence
  Synthetic Sequence
tcgaggtacc

SEQ ID NO: 6881 - DNA, 10 bp, Artificial Sequence
  Synthetic Sequence
gttatatatt

SEQ ID NO: 6882 - DNA, 10 bp, Artificial Sequence
  Synthetic Sequence
gaatcacgct

SEQ ID NO: 6883 - DNA, 10 bp, Artificial Sequence
  Synthetic Sequence
aggatcgtct

SEQ ID NO: 6884 - DNA, 10 bp, Artificial Sequence
  Synthetic Sequence
ggtttgtgac

SEQ ID NO: 6885 - DNA, 10 bp, Artificial Sequence
  Synthetic Sequence
aaatagtagg

SEQ ID NO: 6886 - DNA, 10 bp, Artificial Sequence
  Synthetic Sequence
tgcacgaccc

SEQ ID NO: 6887 - DNA, 10 bp, Artificial Sequence
  Synthetic Sequence
gctcgatgtg

SEQ ID NO: 6888 - DNA, 10 bp, Artificial Sequence
  Synthetic Sequence
ttcagctacg

SEQ ID NO: 6889 - DNA, 10 bp, Artificial Sequence
  Synthetic Sequence
tgttataaat

SEQ ID NO: 6890 - DNA, 10 bp, Artificial Sequence
  Synthetic Sequence
aatccggcgg

SEQ ID NO: 6891 - DNA, 10 bp, Artificial Sequence
  Synthetic Sequence
attggctcat

SEQ ID NO: 6892 - DNA, 10 bp, Artificial Sequence
  Synthetic Sequence
tccgagtagc

SEQ ID NO: 6893 - DNA, 10 bp, Artificial Sequence
  Synthetic Sequence
ctaaatgctg

SEQ ID NO: 6894 - DNA, 10 bp, Artificial Sequence
  Synthetic Sequence
cctacgtaca

SEQ ID NO: 6895 - DNA, 10 bp, Artificial Sequence
  Synthetic Sequence
ataagaccga

SEQ ID NO: 6896 - DNA, 10 bp, Artificial Sequence
  Synthetic Sequence
tcacgcggat

SEQ ID NO: 6897 - DNA, 10 bp, Artificial Sequence
  Synthetic Sequence
gtcgatcacg

SEQ ID NO: 6898 - DNA, 10 bp, Artificial Sequence
  Synthetic Sequence
gtgatggtat

SEQ ID NO: 6899 - DNA, 10 bp, Artificial Sequence
  Synthetic Sequence
ataagtatta

SEQ ID NO: 6900 - DNA, 10 bp, Artificial Sequence
  Synthetic Sequence
taaacagcaa

SEQ ID NO: 6901 - DNA, 10 bp, Artificial Sequence
  Synthetic Sequence
accataacgc

SEQ ID NO: 6902 - DNA, 10 bp, Artificial Sequence
  Synthetic Sequence
agtctgtgag

SEQ ID NO: 6903 - DNA, 10 bp, Artificial Sequence
  Synthetic Sequence
atccaacttt

SEQ ID NO: 6904 - DNA, 10 bp, Artificial Sequence
  Synthetic Sequence
gagtccggaa

SEQ ID NO: 6905 - DNA, 10 bp, Artificial Sequence
  Synthetic Sequence
agccagtatt

SEQ ID NO: 6906 - DNA, 10 bp, Artificial Sequence
  Synthetic Sequence
acgcccgcta

SEQ ID NO: 6907 - DNA, 10 bp, Artificial Sequence
  Synthetic Sequence
tgctacgcaa

SEQ ID NO: 6908 - DNA, 10 bp, Artificial Sequence
  Synthetic Sequence
gcaaacaata

SEQ ID NO: 6909 - DNA, 10 bp, Artificial Sequence
  Synthetic Sequence
tctcttcacg

SEQ ID NO: 6910 - DNA, 10 bp, Artificial Sequence
  Synthetic Sequence
ccatttacgg

SEQ ID NO: 6911 - DNA, 10 bp, Artificial Sequence
  Synthetic Sequence
tacattggtc

SEQ ID NO: 6912 - DNA, 10 bp, Artificial Sequence
  Synthetic Sequence
atcaatgata

SEQ ID NO: 6913 - DNA, 10 bp, Artificial Sequence
  Synthetic Sequence
agtctagaac

SEQ ID NO: 6914 - DNA, 10 bp, Artificial Sequence
  Synthetic Sequence
cgtcatagac

SEQ ID NO: 6915 - DNA, 10 bp, Artificial Sequence
  Synthetic Sequence
aaggttattt

SEQ ID NO: 6916 - DNA, 10 bp, Artificial Sequence
  Synthetic Sequence
agtacagtaa

SEQ ID NO: 6917 - DNA, 10 bp, Artificial Sequence
  Synthetic Sequence
ctggcaaagt

SEQ ID NO: 6918 - DNA, 10 bp, Artificial Sequence
  Synthetic Sequence
gggtgcccta

SEQ ID NO: 6919 - DNA, 10 bp, Artificial Sequence
  Synthetic Sequence
tggcatagat

SEQ ID NO: 6920 - DNA, 10 bp, Artificial Sequence
  Synthetic Sequence
gtttggcgtg

SEQ ID NO: 6921 - DNA, 10 bp, Artificial Sequence
  Synthetic Sequence
aataccgtct

SEQ ID NO: 6922 - DNA, 10 bp, Artificial Sequence
  Synthetic Sequence
gagcgtaaag

SEQ ID NO: 6923 - DNA, 10 bp, Artificial Sequence
  Synthetic Sequence
cccatgttca

SEQ ID NO: 6924 - DNA, 10 bp, Artificial Sequence
  Synthetic Sequence
acgaccatat

SEQ ID NO: 6925 - DNA, 10 bp, Artificial Sequence
  Synthetic Sequence
aaatccataa

SEQ ID NO: 6926 - DNA, 10 bp, Artificial Sequence
  Synthetic Sequence
gcctagggaa

SEQ ID NO: 6927 - DNA, 10 bp, Artificial Sequence
  Synthetic Sequence
cccaatacca

SEQ ID NO: 6928 - DNA, 10 bp, Artificial Sequence
  Synthetic Sequence
gacaagggat

SEQ ID NO: 6929 - DNA, 10 bp, Artificial Sequence
  Synthetic Sequence
ctgtggccta

SEQ ID NO: 6930 - DNA, 10 bp, Artificial Sequence
  Synthetic Sequence
gggatactat

SEQ ID NO: 6931 - DNA, 10 bp, Artificial Sequence
  Synthetic Sequence
ttgcctctac

SEQ ID NO: 6932 - DNA, 10 bp, Artificial Sequence
  Synthetic Sequence
cccaaattcc

SEQ ID NO: 6933 - DNA, 10 bp, Artificial Sequence
  Synthetic Sequence
tcggaccgca

SEQ ID NO: 6934 - DNA, 10 bp, Artificial Sequence
  Synthetic Sequence
tatgcccgaa

SEQ ID NO: 6935 - DNA, 10 bp, Artificial Sequence
  Synthetic Sequence
gtcgtggcct

SEQ ID NO: 6936 - DNA, 10 bp, Artificial Sequence
  Synthetic Sequence
ctccgcatgt

SEQ ID NO: 6937 - DNA, 10 bp, Artificial Sequence
  Synthetic Sequence
acgtggcatg

SEQ ID NO: 6938 - DNA, 10 bp, Artificial Sequence
  Synthetic Sequence
atctctatgt

SEQ ID NO: 6939 - DNA, 10 bp, Artificial Sequence
  Synthetic Sequence
aagcgcgctg

SEQ ID NO: 6940 - DNA, 10 bp, Artificial Sequence
  Synthetic Sequence
ttgtggaagc

SEQ ID NO: 6941 - DNA, 10 bp, Artificial Sequence
  Synthetic Sequence
acgataacct

SEQ ID NO: 6942 - DNA, 10 bp, Artificial Sequence
  Synthetic Sequence
ggcatatgcc

SEQ ID NO: 6943 - DNA, 10 bp, Artificial Sequence
  Synthetic Sequence
agcacaagca

SEQ ID NO: 6944 - DNA, 10 bp, Artificial Sequence
  Synthetic Sequence
gcctaacgtc

SEQ ID NO: 6945 - DNA, 10 bp, Artificial Sequence
  Synthetic Sequence
ccgcgtgaag

SEQ ID NO: 6946 - DNA, 10 bp, Artificial Sequence
  Synthetic Sequence
gtttggagca

SEQ ID NO: 6947 - DNA, 10 bp, Artificial Sequence
  Synthetic Sequence
acatgcccgg

SEQ ID NO: 6948 - DNA, 10 bp, Artificial Sequence
  Synthetic Sequence
tcgaattaaa

SEQ ID NO: 6949 - DNA, 10 bp, Artificial Sequence
  Synthetic Sequence
taacatgtga

SEQ ID NO: 6950 - DNA, 10 bp, Artificial Sequence
  Synthetic Sequence
cgagaaactt

SEQ ID NO: 6951 - DNA, 10 bp, Artificial Sequence
  Synthetic Sequence
accgcgagtg

SEQ ID NO: 6952 - DNA, 10 bp, Artificial Sequence
  Synthetic Sequence
tgtgagtttc

SEQ ID NO: 6953 - DNA, 10 bp, Artificial Sequence
  Synthetic Sequence
gcatgagctt

SEQ ID NO: 6954 - DNA, 10 bp, Artificial Sequence
  Synthetic Sequence
gaattaatca

SEQ ID NO: 6955 - DNA, 10 bp, Artificial Sequence
  Synthetic Sequence
attaaagaca

SEQ ID NO: 6956 - DNA, 10 bp, Artificial Sequence
  Synthetic Sequence
ggacgcttct

SEQ ID NO: 6957 - DNA, 10 bp, Artificial Sequence
  Synthetic Sequence
gactattacg

SEQ ID NO: 6958 - DNA, 10 bp, Artificial Sequence
  Synthetic Sequence
cgctttcttg

SEQ ID NO: 6959 - DNA, 10 bp, Artificial Sequence
  Synthetic Sequence
agagggatca

SEQ ID NO: 6960 - DNA, 10 bp, Artificial Sequence
  Synthetic Sequence
ggtgcccaga

SEQ ID NO: 6961 - DNA, 10 bp, Artificial Sequence
  Synthetic Sequence
tcagtgatgt

SEQ ID NO: 6962 - DNA, 10 bp, Artificial Sequence
  Synthetic Sequence
cctgaaggag

SEQ ID NO: 6963 - DNA, 10 bp, Artificial Sequence
  Synthetic Sequence
tacattgcag

SEQ ID NO: 6964 - DNA, 10 bp, Artificial Sequence
  Synthetic Sequence
aaatgagaaa

SEQ ID NO: 6965 - DNA, 10 bp, Artificial Sequence
  Synthetic Sequence
cactaacata

SEQ ID NO: 6966 - DNA, 10 bp, Artificial Sequence
  Synthetic Sequence
tttagggtcg

SEQ ID NO: 6967 - DNA, 10 bp, Artificial Sequence
  Synthetic Sequence
ccggtactta

SEQ ID NO: 6968 - DNA, 10 bp, Artificial Sequence
  Synthetic Sequence
aatacctcat

SEQ ID NO: 6969 - DNA, 10 bp, Artificial Sequence
  Synthetic Sequence
tctttagtat

SEQ ID NO: 6970 - DNA, 10 bp, Artificial Sequence
  Synthetic Sequence
attattgggt

SEQ ID NO: 6971 - DNA, 10 bp, Artificial Sequence
  Synthetic Sequence
actttctatc

SEQ ID NO: 6972 - DNA, 10 bp, Artificial Sequence
  Synthetic Sequence
tgtgtaaaga

SEQ ID NO: 6973 - DNA, 10 bp, Artificial Sequence
  Synthetic Sequence
tctgttcagt

SEQ ID NO: 6974 - DNA, 10 bp, Artificial Sequence
  Synthetic Sequence
gtcctcgaca

SEQ ID NO: 6975 - DNA, 10 bp, Artificial Sequence
  Synthetic Sequence
ccataaactc

SEQ ID NO: 6976 - DNA, 10 bp, Artificial Sequence
  Synthetic Sequence
aaacacctgt

SEQ ID NO: 6977 - DNA, 10 bp, Artificial Sequence
  Synthetic Sequence
ttgtgactcc

SEQ ID NO: 6978 - DNA, 10 bp, Artificial Sequence
  Synthetic Sequence
acttcccatg

SEQ ID NO: 6979 - DNA, 10 bp, Artificial Sequence
  Synthetic Sequence
tgctgctccg

SEQ ID NO: 6980 - DNA, 10 bp, Artificial Sequence
  Synthetic Sequence
taattggtgc

SEQ ID NO: 6981 - DNA, 10 bp, Artificial Sequence
  Synthetic Sequence
gtggaagcaa

SEQ ID NO: 6982 - DNA, 10 bp, Artificial Sequence
  Synthetic Sequence
ttcatcgagt

SEQ ID NO: 6983 - DNA, 10 bp, Artificial Sequence
  Synthetic Sequence
cgcccataat

SEQ ID NO: 6984 - DNA, 10 bp, Artificial Sequence
  Synthetic Sequence
aattctgtgt

SEQ ID NO: 6985 - DNA, 10 bp, Artificial Sequence
  Synthetic Sequence
tctgttcctc

SEQ ID NO: 6986 - DNA, 10 bp, Artificial Sequence
  Synthetic Sequence
tgattctgaa

SEQ ID NO: 6987 - DNA, 10 bp, Artificial Sequence
  Synthetic Sequence
ggcaaggagc

SEQ ID NO: 6988 - DNA, 10 bp, Artificial Sequence
  Synthetic Sequence
tgtgcttgtc

SEQ ID NO: 6989 - DNA, 10 bp, Artificial Sequence
  Synthetic Sequence
gactcgcaaa

SEQ ID NO: 6990 - DNA, 10 bp, Artificial Sequence
  Synthetic Sequence
ctcaaccaca

SEQ ID NO: 6991 - DNA, 10 bp, Artificial Sequence
  Synthetic Sequence
attaatgtcg

SEQ ID NO: 6992 - DNA, 10 bp, Artificial Sequence
  Synthetic Sequence
attcgtacac

SEQ ID NO: 6993 - DNA, 10 bp, Artificial Sequence
  Synthetic Sequence
tagcgtacgt

SEQ ID NO: 6994 - DNA, 10 bp, Artificial Sequence
  Synthetic Sequence
acgttccgca

SEQ ID NO: 6995 - DNA, 10 bp, Artificial Sequence
  Synthetic Sequence
caaactccag

SEQ ID NO: 6996 - DNA, 10 bp, Artificial Sequence
  Synthetic Sequence
cgtccgacag

SEQ ID NO: 6997 - DNA, 10 bp, Artificial Sequence
  Synthetic Sequence
agcccagcta

SEQ ID NO: 6998 - DNA, 10 bp, Artificial Sequence
  Synthetic Sequence
gactaggaag

SEQ ID NO: 6999 - DNA, 10 bp, Artificial Sequence
  Synthetic Sequence
cgacactttg

SEQ ID NO: 7000 - DNA, 10 bp, Artificial Sequence
  Synthetic Sequence
ataagcacca

SEQ ID NO: 7001 - DNA, 10 bp, Artificial Sequence
  Synthetic Sequence
gcaacatgcc

SEQ ID NO: 7002 - DNA, 10 bp, Artificial Sequence
  Synthetic Sequence
gctggcgact

SEQ ID NO: 7003 - DNA, 10 bp, Artificial Sequence
  Synthetic Sequence
gtggagcaac

SEQ ID NO: 7004 - DNA, 10 bp, Artificial Sequence
  Synthetic Sequence
aagacctcgc

SEQ ID NO: 7005 - DNA, 10 bp, Artificial Sequence
  Synthetic Sequence
cccaccgata

SEQ ID NO: 7006 - DNA, 10 bp, Artificial Sequence
  Synthetic Sequence
gtgatttgat

SEQ ID NO: 7007 - DNA, 10 bp, Artificial Sequence
  Synthetic Sequence
tcccgtgcat

SEQ ID NO: 7008 - DNA, 10 bp, Artificial Sequence
  Synthetic Sequence
tctgggattg

SEQ ID NO: 7009 - DNA, 10 bp, Artificial Sequence
  Synthetic Sequence
tcatgaggcg

SEQ ID NO: 7010 - DNA, 10 bp, Artificial Sequence
  Synthetic Sequence
aggtatcaca

SEQ ID NO: 7011 - DNA, 10 bp, Artificial Sequence
  Synthetic Sequence
cgcgcagttc

SEQ ID NO: 7012 - DNA, 10 bp, Artificial Sequence
  Synthetic Sequence
cccttataat

SEQ ID NO: 7013 - DNA, 10 bp, Artificial Sequence
  Synthetic Sequence
tttgtcgcag

SEQ ID NO: 7014 - DNA, 10 bp, Artificial Sequence
  Synthetic Sequence
acggccacga

SEQ ID NO: 7015 - DNA, 10 bp, Artificial Sequence
  Synthetic Sequence
tgggtgctct

SEQ ID NO: 7016 - DNA, 10 bp, Artificial Sequence
  Synthetic Sequence
tcctctagct

SEQ ID NO: 7017 - DNA, 10 bp, Artificial Sequence
  Synthetic Sequence
gaatcggtcg

SEQ ID NO: 7018 - DNA, 10 bp, Artificial Sequence
  Synthetic Sequence
gtcaatccgc

SEQ ID NO: 7019 - DNA, 10 bp, Artificial Sequence
  Synthetic Sequence
tgcgtgagac

SEQ ID NO: 7020 - DNA, 10 bp, Artificial Sequence
  Synthetic Sequence
agttaaccta

SEQ ID NO: 7021 - DNA, 10 bp, Artificial Sequence
  Synthetic Sequence
agagttggcc

SEQ ID NO: 7022 - DNA, 10 bp, Artificial Sequence
  Synthetic Sequence
tcaatgaatc

SEQ ID NO: 7023 - DNA, 10 bp, Artificial Sequence
  Synthetic Sequence
acagctaaag

SEQ ID NO: 7024 - DNA, 10 bp, Artificial Sequence
  Synthetic Sequence
cgtgtagaag

SEQ ID NO: 7025 - DNA, 10 bp, Artificial Sequence
  Synthetic Sequence
gatgtaacga

SEQ ID NO: 7026 - DNA, 10 bp, Artificial Sequence
  Synthetic Sequence
ggccctaatc

SEQ ID NO: 7027 - DNA, 10 bp, Artificial Sequence
  Synthetic Sequence
acgtttgatt

SEQ ID NO: 7028 - DNA, 10 bp, Artificial Sequence
  Synthetic Sequence
cgttgtggcc

SEQ ID NO: 7029 - DNA, 10 bp, Artificial Sequence
  Synthetic Sequence
tacgccaata

SEQ ID NO: 7030 - DNA, 10 bp, Artificial Sequence
  Synthetic Sequence
gaagaaaggt

SEQ ID NO: 7031 - DNA, 10 bp, Artificial Sequence
  Synthetic Sequence
ccatcttcct

SEQ ID NO: 7032 - DNA, 10 bp, Artificial Sequence
  Synthetic Sequence
caagggtcag

SEQ ID NO: 7033 - DNA, 10 bp, Artificial Sequence
  Synthetic Sequence
ttagtcatag

SEQ ID NO: 7034 - DNA, 10 bp, Artificial Sequence
  Synthetic Sequence
agtctgaagg

SEQ ID NO: 7035 - DNA, 10 bp, Artificial Sequence
  Synthetic Sequence
cgcggagaca

SEQ ID NO: 7036 - DNA, 10 bp, Artificial Sequence
  Synthetic Sequence
tggcggactc

SEQ ID NO: 7037 - DNA, 10 bp, Artificial Sequence
  Synthetic Sequence
actgccctga

SEQ ID NO: 7038 - DNA, 10 bp, Artificial Sequence
  Synthetic Sequence
ccgccgaaga

SEQ ID NO: 7039 - DNA, 10 bp, Artificial Sequence
  Synthetic Sequence
ttaataccgc

SEQ ID NO: 7040 - DNA, 10 bp, Artificial Sequence
  Synthetic Sequence
cggcattgtc

SEQ ID NO: 7041 - DNA, 10 bp, Artificial Sequence
  Synthetic Sequence
aggatgcgta

SEQ ID NO: 7042 - DNA, 10 bp, Artificial Sequence
  Synthetic Sequence
gtacagcaaa

SEQ ID NO: 7043 - DNA, 10 bp, Artificial Sequence
  Synthetic Sequence
atatcgccct

SEQ ID NO: 7044 - DNA, 10 bp, Artificial Sequence
  Synthetic Sequence
tgcaccgtta

SEQ ID NO: 7045 - DNA, 10 bp, Artificial Sequence
  Synthetic Sequence
cgtccatagc

SEQ ID NO: 7046 - DNA, 10 bp, Artificial Sequence
  Synthetic Sequence
gcgcgtcagt

SEQ ID NO: 7047 - DNA, 10 bp, Artificial Sequence
  Synthetic Sequence
tcggaataca

SEQ ID NO: 7048 - DNA, 10 bp, Artificial Sequence
  Synthetic Sequence
cgttgtaaca

SEQ ID NO: 7049 - DNA, 10 bp, Artificial Sequence
  Synthetic Sequence
atcttgggag

SEQ ID NO: 7050 - DNA, 10 bp, Artificial Sequence
  Synthetic Sequence
tccttgcgaa

SEQ ID NO: 7051 - DNA, 10 bp, Artificial Sequence
  Synthetic Sequence
gtaaggctga

SEQ ID NO: 7052 - DNA, 10 bp, Artificial Sequence
  Synthetic Sequence
cccgttctaa

SEQ ID NO: 7053 - DNA, 10 bp, Artificial Sequence
  Synthetic Sequence
tgcccgaatg

SEQ ID NO: 7054 - DNA, 10 bp, Artificial Sequence
  Synthetic Sequence
tgtccttcat

SEQ ID NO: 7055 - DNA, 10 bp, Artificial Sequence
  Synthetic Sequence
gatcagtaca

SEQ ID NO: 7056 - DNA, 10 bp, Artificial Sequence
  Synthetic Sequence
tatttagatc

SEQ ID NO: 7057 - DNA, 10 bp, Artificial Sequence
  Synthetic Sequence
tggtcacagc

SEQ ID NO: 7058 - DNA, 10 bp, Artificial Sequence
  Synthetic Sequence
gcatccgaaa

SEQ ID NO: 7059 - DNA, 10 bp, Artificial Sequence
  Synthetic Sequence
gcggtggtgt

SEQ ID NO: 7060 - DNA, 10 bp, Artificial Sequence
  Synthetic Sequence
ctagtgagcc

SEQ ID NO: 7061 - DNA, 10 bp, Artificial Sequence
  Synthetic Sequence
atctatattc

SEQ ID NO: 7062 - DNA, 10 bp, Artificial Sequence
  Synthetic Sequence
cttgtccgtc

SEQ ID NO: 7063 - DNA, 10 bp, Artificial Sequence
  Synthetic Sequence
agtcaaattg

SEQ ID NO: 7064 - DNA, 10 bp, Artificial Sequence
  Synthetic Sequence
gaggtcttaa

SEQ ID NO: 7065 - DNA, 10 bp, Artificial Sequence
  Synthetic Sequence
tagcgtagca

SEQ ID NO: 7066 - DNA, 10 bp, Artificial Sequence
  Synthetic Sequence
ctacctgggt

SEQ ID NO: 7067 - DNA, 10 bp, Artificial Sequence
  Synthetic Sequence
acgagccgga

SEQ ID NO: 7068 - DNA, 10 bp, Artificial Sequence
  Synthetic Sequence
gccgtatctt

SEQ ID NO: 7069 - DNA, 10 bp, Artificial Sequence
  Synthetic Sequence
gtctagacca

SEQ ID NO: 7070 - DNA, 10 bp, Artificial Sequence
  Synthetic Sequence
agctgcttag

SEQ ID NO: 7071 - DNA, 10 bp, Artificial Sequence
  Synthetic Sequence
gagccgcaac

SEQ ID NO: 7072 - DNA, 10 bp, Artificial Sequence
  Synthetic Sequence
tcggtttatc

SEQ ID NO: 7073 - DNA, 10 bp, Artificial Sequence
  Synthetic Sequence
ctttagattg

SEQ ID NO: 7074 - DNA, 10 bp, Artificial Sequence
  Synthetic Sequence
ggtgtgaaca

SEQ ID NO: 7075 - DNA, 10 bp, Artificial Sequence
  Synthetic Sequence
agggacatat

SEQ ID NO: 7076 - DNA, 10 bp, Artificial Sequence
  Synthetic Sequence
ccctgggtgt

SEQ ID NO: 7077 - DNA, 10 bp, Artificial Sequence
  Synthetic Sequence
ggacacgtat

SEQ ID NO: 7078 - DNA, 10 bp, Artificial Sequence
  Synthetic Sequence
acctgagcga

SEQ ID NO: 7079 - DNA, 10 bp, Artificial Sequence
  Synthetic Sequence
tcgtcgtcgc

SEQ ID NO: 7080 - DNA, 10 bp, Artificial Sequence
  Synthetic Sequence
tccaatcatc

SEQ ID NO: 7081 - DNA, 10 bp, Artificial Sequence
  Synthetic Sequence
acccttaatg

SEQ ID NO: 7082 - DNA, 10 bp, Artificial Sequence
  Synthetic Sequence
ccatcagctg

SEQ ID NO: 7083 - DNA, 10 bp, Artificial Sequence
  Synthetic Sequence
gtagccaagt

SEQ ID NO: 7084 - DNA, 10 bp, Artificial Sequence
  Synthetic Sequence
aaatatgtcc

SEQ ID NO: 7085 - DNA, 10 bp, Artificial Sequence
  Synthetic Sequence
gcttagcgcc

SEQ ID NO: 7086 - DNA, 10 bp, Artificial Sequence
  Synthetic Sequence
tgagggaccg

SEQ ID NO: 7087 - DNA, 10 bp, Artificial Sequence
  Synthetic Sequence
gttagctaag

SEQ ID NO: 7088 - DNA, 10 bp, Artificial Sequence
  Synthetic Sequence
tttggcccga

SEQ ID NO: 7089 - DNA, 10 bp, Artificial Sequence
  Synthetic Sequence
gccacagcag

SEQ ID NO: 7090 - DNA, 10 bp, Artificial Sequence
  Synthetic Sequence
ctaggatata

SEQ ID NO: 7091 - DNA, 10 bp, Artificial Sequence
  Synthetic Sequence
gatttgttct

SEQ ID NO: 7092 - DNA, 10 bp, Artificial Sequence
  Synthetic Sequence
ccgcttagtc

SEQ ID NO: 7093 - DNA, 10 bp, Artificial Sequence
  Synthetic Sequence
cagtcacttt

SEQ ID NO: 7094 - DNA, 10 bp, Artificial Sequence
  Synthetic Sequence
gatgactcaa

SEQ ID NO: 7095 - DNA, 10 bp, Artificial Sequence
  Synthetic Sequence
aggagctgag

SEQ ID NO: 7096 - DNA, 10 bp, Artificial Sequence
  Synthetic Sequence
tcgtaacgta

SEQ ID NO: 7097 - DNA, 10 bp, Artificial Sequence
  Synthetic Sequence
gtccaacctc

SEQ ID NO: 7098 - DNA, 10 bp, Artificial Sequence
  Synthetic Sequence
atttgatccg

SEQ ID NO: 7099 - DNA, 10 bp, Artificial Sequence
  Synthetic Sequence
gcgctttaag

SEQ ID NO: 7100 - DNA, 10 bp, Artificial Sequence
  Synthetic Sequence
ggcacgtgca

SEQ ID NO: 7101 - DNA, 10 bp, Artificial Sequence
  Synthetic Sequence
gaggaatgac

SEQ ID NO: 7102 - DNA, 10 bp, Artificial Sequence
  Synthetic Sequence
tcgctaggtg

SEQ ID NO: 7103 - DNA, 10 bp, Artificial Sequence
  Synthetic Sequence
ggttccaggt

SEQ ID NO: 7104 - DNA, 10 bp, Artificial Sequence
  Synthetic Sequence
gagtgatgaa

SEQ ID NO: 7105 - DNA, 10 bp, Artificial Sequence
  Synthetic Sequence
atgtacgtcc

SEQ ID NO: 7106 - DNA, 10 bp, Artificial Sequence
  Synthetic Sequence
tggaccgcaa

SEQ ID NO: 7107 - DNA, 10 bp, Artificial Sequence
  Synthetic Sequence
cctcgcatcg

SEQ ID NO: 7108 - DNA, 10 bp, Artificial Sequence
  Synthetic Sequence
cctacatatg

SEQ ID NO: 7109 - DNA, 10 bp, Artificial Sequence
  Synthetic Sequence
cccttagtca

SEQ ID NO: 7110 - DNA, 10 bp, Artificial Sequence
  Synthetic Sequence
cggtgacgta

SEQ ID NO: 7111 - DNA, 10 bp, Artificial Sequence
  Synthetic Sequence
tgaatcgccg

SEQ ID NO: 7112 - DNA, 10 bp, Artificial Sequence
  Synthetic Sequence
tacgctttca

SEQ ID NO: 7113 - DNA, 10 bp, Artificial Sequence
  Synthetic Sequence
gcatccacca

SEQ ID NO: 7114 - DNA, 10 bp, Artificial Sequence
  Synthetic Sequence
gtttgtaata

SEQ ID NO: 7115 - DNA, 10 bp, Artificial Sequence
  Synthetic Sequence
gttaaactcg

SEQ ID NO: 7116 - DNA, 10 bp, Artificial Sequence
  Synthetic Sequence
aacgtcttat

SEQ ID NO: 7117 - DNA, 10 bp, Artificial Sequence
  Synthetic Sequence
gaaccaacgc

SEQ ID NO: 7118 - DNA, 10 bp, Artificial Sequence
  Synthetic Sequence
tttcgttacg

SEQ ID NO: 7119 - DNA, 10 bp, Artificial Sequence
  Synthetic Sequence
gcacaacagc

SEQ ID NO: 7120 - DNA, 10 bp, Artificial Sequence
  Synthetic Sequence
tattaattaa

SEQ ID NO: 7121 - DNA, 10 bp, Artificial Sequence
  Synthetic Sequence
agcaacctgc

SEQ ID NO: 7122 - DNA, 10 bp, Artificial Sequence
  Synthetic Sequence
ctccctctgg

SEQ ID NO: 7123 - DNA, 10 bp, Artificial Sequence
  Synthetic Sequence
acctgtgcag

SEQ ID NO: 7124 - DNA, 10 bp, Artificial Sequence
  Synthetic Sequence
aacgcctgcg

SEQ ID NO: 7125 - DNA, 10 bp, Artificial Sequence
  Synthetic Sequence
agcaaatgga

SEQ ID NO: 7126 - DNA, 10 bp, Artificial Sequence
  Synthetic Sequence
gcgtgctgtg

SEQ ID NO: 7127 - DNA, 10 bp, Artificial Sequence
  Synthetic Sequence
catgtttgaa

SEQ ID NO: 7128 - DNA, 10 bp, Artificial Sequence
  Synthetic Sequence
agtatcttac

SEQ ID NO: 7129 - DNA, 10 bp, Artificial Sequence
  Synthetic Sequence
ccatccctac

SEQ ID NO: 7130 - DNA, 10 bp, Artificial Sequence
  Synthetic Sequence
acaggcttcc

SEQ ID NO: 7131 - DNA, 10 bp, Artificial Sequence
  Synthetic Sequence
tatcaagacg

SEQ ID NO: 7132 - DNA, 10 bp, Artificial Sequence
  Synthetic Sequence
gaccgagtgc

SEQ ID NO: 7133 - DNA, 10 bp, Artificial Sequence
  Synthetic Sequence
cagcaccact

SEQ ID NO: 7134 - DNA, 10 bp, Artificial Sequence
  Synthetic Sequence
agtaacagag

SEQ ID NO: 7135 - DNA, 10 bp, Artificial Sequence
  Synthetic Sequence
ccctttcggt

SEQ ID NO: 7136 - DNA, 10 bp, Artificial Sequence
  Synthetic Sequence
cccgcctaca

SEQ ID NO: 7137 - DNA, 10 bp, Artificial Sequence
  Synthetic Sequence
ccgttgcgtg

SEQ ID NO: 7138 - DNA, 10 bp, Artificial Sequence
  Synthetic Sequence
gtctaccaac

SEQ ID NO: 7139 - DNA, 10 bp, Artificial Sequence
  Synthetic Sequence
cgttctgacg

SEQ ID NO: 7140 - DNA, 10 bp, Artificial Sequence
  Synthetic Sequence
aagccactcg

SEQ ID NO: 7141 - DNA, 10 bp, Artificial Sequence
  Synthetic Sequence
tagaacgccc

SEQ ID NO: 7142 - DNA, 10 bp, Artificial Sequence
  Synthetic Sequence
ttctagggac

SEQ ID NO: 7143 - DNA, 10 bp, Artificial Sequence
  Synthetic Sequence
tctatttact

SEQ ID NO: 7144 - DNA, 10 bp, Artificial Sequence
  Synthetic Sequence
catgttcacc

SEQ ID NO: 7145 - DNA, 10 bp, Artificial Sequence
  Synthetic Sequence
cgaggtcgtg

SEQ ID NO: 7146 - DNA, 10 bp, Artificial Sequence
  Synthetic Sequence
ataggagacc

SEQ ID NO: 7147 - DNA, 10 bp, Artificial Sequence
  Synthetic Sequence
agagcggatg

SEQ ID NO: 7148 - DNA, 10 bp, Artificial Sequence
  Synthetic Sequence
cagcaacgcc

SEQ ID NO: 7149 - DNA, 10 bp, Artificial Sequence
  Synthetic Sequence
gccgtcatcg

SEQ ID NO: 7150 - DNA, 10 bp, Artificial Sequence
  Synthetic Sequence
tcgttatcat

SEQ ID NO: 7151 - DNA, 10 bp, Artificial Sequence
  Synthetic Sequence
ctaattaact

SEQ ID NO: 7152 - DNA, 10 bp, Artificial Sequence
  Synthetic Sequence
agcttattct

SEQ ID NO: 7153 - DNA, 10 bp, Artificial Sequence
  Synthetic Sequence
agaaaccacc

SEQ ID NO: 7154 - DNA, 10 bp, Artificial Sequence
  Synthetic Sequence
aagacggtga

SEQ ID NO: 7155 - DNA, 10 bp, Artificial Sequence
  Synthetic Sequence
ttgcccagtg

SEQ ID NO: 7156 - DNA, 10 bp, Artificial Sequence
  Synthetic Sequence
tgtagcgtag

SEQ ID NO: 7157 - DNA, 10 bp, Artificial Sequence
  Synthetic Sequence
cgcatgacag

SEQ ID NO: 7158 - DNA, 10 bp, Artificial Sequence
  Synthetic Sequence
ttaaggaatg

SEQ ID NO: 7159 - DNA, 10 bp, Artificial Sequence
  Synthetic Sequence
aactgactta

SEQ ID NO: 7160 - DNA, 10 bp, Artificial Sequence
  Synthetic Sequence
caccgcaagc

SEQ ID NO: 7161 - DNA, 10 bp, Artificial Sequence
  Synthetic Sequence
aagttgcatt

SEQ ID NO: 7162 - DNA, 10 bp, Artificial Sequence
  Synthetic Sequence
tagatctaga

SEQ ID NO: 7163 - DNA, 10 bp, Artificial Sequence
  Synthetic Sequence
ctttgcggtg

SEQ ID NO: 7164 - DNA, 10 bp, Artificial Sequence
  Synthetic Sequence
aacatcaaag

SEQ ID NO: 7165 - DNA, 10 bp, Artificial Sequence
  Synthetic Sequence
gtccctcaga

SEQ ID NO: 7166 - DNA, 10 bp, Artificial Sequence
  Synthetic Sequence
ggaagctaca

SEQ ID NO: 7167 - DNA, 10 bp, Artificial Sequence
  Synthetic Sequence
gatgccagcg

SEQ ID NO: 7168 - DNA, 10 bp, Artificial Sequence
  Synthetic Sequence
aaccctggcc

SEQ ID NO: 7169 - DNA, 10 bp, Artificial Sequence
  Synthetic Sequence
aattgtcggt

SEQ ID NO: 7170 - DNA, 10 bp, Artificial Sequence
  Synthetic Sequence
ggcgtgttct

SEQ ID NO: 7171 - DNA, 10 bp, Artificial Sequence
  Synthetic Sequence
ttcatgtccg

SEQ ID NO: 7172 - DNA, 10 bp, Artificial Sequence
  Synthetic Sequence
aatatcaatt

SEQ ID NO: 7173 - DNA, 10 bp, Artificial Sequence
  Synthetic Sequence
cgtctttctc

SEQ ID NO: 7174 - DNA, 10 bp, Artificial Sequence
  Synthetic Sequence
ataggactaa

SEQ ID NO: 7175 - DNA, 10 bp, Artificial Sequence
  Synthetic Sequence
gccatgtcgg

SEQ ID NO: 7176 - DNA, 10 bp, Artificial Sequence
  Synthetic Sequence
tgaattcaaa

SEQ ID NO: 7177 - DNA, 10 bp, Artificial Sequence
  Synthetic Sequence
aactgcttct

SEQ ID NO: 7178 - DNA, 10 bp, Artificial Sequence
  Synthetic Sequence
ttgctagtgt

SEQ ID NO: 7179 - DNA, 10 bp, Artificial Sequence
  Synthetic Sequence
tgcaactatg

SEQ ID NO: 7180 - DNA, 10 bp, Artificial Sequence
  Synthetic Sequence
tcaattgcaa

SEQ ID NO: 7181 - DNA, 10 bp, Artificial Sequence
  Synthetic Sequence
ttaagtcgtg

SEQ ID NO: 7182 - DNA, 10 bp, Artificial Sequence
  Synthetic Sequence
ggaaggtgcc

SEQ ID NO: 7183 - DNA, 10 bp, Artificial Sequence
  Synthetic Sequence
acgggttaca

SEQ ID NO: 7184 - DNA, 10 bp, Artificial Sequence
  Synthetic Sequence
gacagcttgg

SEQ ID NO: 7185 - DNA, 10 bp, Artificial Sequence
  Synthetic Sequence
tcagggtctg

SEQ ID NO: 7186 - DNA, 10 bp, Artificial Sequence
  Synthetic Sequence
cctaatcgtg

SEQ ID NO: 7187 - DNA, 10 bp, Artificial Sequence
  Synthetic Sequence
tgggcggtat

SEQ ID NO: 7188 - DNA, 10 bp, Artificial Sequence
  Synthetic Sequence
ctaaaccaag

SEQ ID NO: 7189 - DNA, 10 bp, Artificial Sequence
  Synthetic Sequence
gcaccttcga

SEQ ID NO: 7190 - DNA, 10 bp, Artificial Sequence
  Synthetic Sequence
ccgtggtgag

SEQ ID NO: 7191 - DNA, 10 bp, Artificial Sequence
  Synthetic Sequence
gttctctccc

SEQ ID NO: 7192 - DNA, 10 bp, Artificial Sequence
  Synthetic Sequence
tccttcgaca

SEQ ID NO: 7193 - DNA, 10 bp, Artificial Sequence
  Synthetic Sequence
gttggattgt

SEQ ID NO: 7194 - DNA, 10 bp, Artificial Sequence
  Synthetic Sequence
aagagaggcg

SEQ ID NO: 7195 - DNA, 10 bp, Artificial Sequence
  Synthetic Sequence
gtttccttct

SEQ ID NO: 7196 - DNA, 10 bp, Artificial Sequence
  Synthetic Sequence
tgtcgcggtc

SEQ ID NO: 7197 - DNA, 10 bp, Artificial Sequence
  Synthetic Sequence
ggcggacaga

SEQ ID NO: 7198 - DNA, 10 bp, Artificial Sequence
  Synthetic Sequence
ctaggctgtg

SEQ ID NO: 7199 - DNA, 10 bp, Artificial Sequence
  Synthetic Sequence
gttcgtgaca

SEQ ID NO: 7200 - DNA, 10 bp, Artificial Sequence
  Synthetic Sequence
tcaatgtttg

SEQ ID NO: 7201 - DNA, 10 bp, Artificial Sequence
  Synthetic Sequence
ttacttgcgg

SEQ ID NO: 7202 - DNA, 10 bp, Artificial Sequence
  Synthetic Sequence
ctttataaga

SEQ ID NO: 7203 - DNA, 10 bp, Artificial Sequence
  Synthetic Sequence
gctctgcagc

SEQ ID NO: 7204 - DNA, 10 bp, Artificial Sequence
  Synthetic Sequence
cagaggtaac

SEQ ID NO: 7205 - DNA, 10 bp, Artificial Sequence
  Synthetic Sequence
tacagaagta

SEQ ID NO: 7206 - DNA, 10 bp, Artificial Sequence
  Synthetic Sequence
gtttgcggcc

SEQ ID NO: 7207 - DNA, 10 bp, Artificial Sequence
  Synthetic Sequence
ttcccataca

SEQ ID NO: 7208 - DNA, 10 bp, Artificial Sequence
  Synthetic Sequence
acctacaaca

SEQ ID NO: 7209 - DNA, 10 bp, Artificial Sequence
  Synthetic Sequence
ttcaaaccat

SEQ ID NO: 7210 - DNA, 10 bp, Artificial Sequence
  Synthetic Sequence
aatcggacgt

SEQ ID NO: 7211 - DNA, 10 bp, Artificial Sequence
  Synthetic Sequence
gtccgaacaa

SEQ ID NO: 7212 - DNA, 10 bp, Artificial Sequence
  Synthetic Sequence
gtaatttgcc

SEQ ID NO: 7213 - DNA, 10 bp, Artificial Sequence
  Synthetic Sequence
gttccaaaga

SEQ ID NO: 7214 - DNA, 10 bp, Artificial Sequence
  Synthetic Sequence
ggagttaaac

SEQ ID NO: 7215 - DNA, 10 bp, Artificial Sequence
  Synthetic Sequence
aagcgtcaac

SEQ ID NO: 7216 - DNA, 10 bp, Artificial Sequence
  Synthetic Sequence
ccggctgatg

SEQ ID NO: 7217 - DNA, 10 bp, Artificial Sequence
  Synthetic Sequence
agacgcagcg

SEQ ID NO: 7218 - DNA, 10 bp, Artificial Sequence
  Synthetic Sequence
aaacgtacca

SEQ ID NO: 7219 - DNA, 10 bp, Artificial Sequence
  Synthetic Sequence
cggtgtaaac

SEQ ID NO: 7220 - DNA, 10 bp, Artificial Sequence
  Synthetic Sequence
catgcgccta

SEQ ID NO: 7221 - DNA, 10 bp, Artificial Sequence
  Synthetic Sequence
atttgaccgc

SEQ ID NO: 7222 - DNA, 10 bp, Artificial Sequence
  Synthetic Sequence
gcagagcctc

SEQ ID NO: 7223 - DNA, 10 bp, Artificial Sequence
  Synthetic Sequence
tttggtagac

SEQ ID NO: 7224 - DNA, 10 bp, Artificial Sequence
  Synthetic Sequence
actaaattaa

SEQ ID NO: 7225 - DNA, 10 bp, Artificial Sequence
  Synthetic Sequence
taacacactc

SEQ ID NO: 7226 - DNA, 10 bp, Artificial Sequence
  Synthetic Sequence
gtatgagttg

SEQ ID NO: 7227 - DNA, 10 bp, Artificial Sequence
  Synthetic Sequence
actgttggct

SEQ ID NO: 7228 - DNA, 10 bp, Artificial Sequence
  Synthetic Sequence
gtagcgcgac

SEQ ID NO: 7229 - DNA, 10 bp, Artificial Sequence
  Synthetic Sequence
ctagtgtagg

SEQ ID NO: 7230 - DNA, 10 bp, Artificial Sequence
  Synthetic Sequence
ccgtcttcta

SEQ ID NO: 7231 - DNA, 10 bp, Artificial Sequence
  Synthetic Sequence
ctgagtacct

SEQ ID NO: 7232 - DNA, 10 bp, Artificial Sequence
  Synthetic Sequence
gggtaccggt

SEQ ID NO: 7233 - DNA, 10 bp, Artificial Sequence
  Synthetic Sequence
ctcgtgctgt

SEQ ID NO: 7234 - DNA, 10 bp, Artificial Sequence
  Synthetic Sequence
tccacagatg

SEQ ID NO: 7235 - DNA, 10 bp, Artificial Sequence
  Synthetic Sequence
gattatctga

SEQ ID NO: 7236 - DNA, 10 bp, Artificial Sequence
  Synthetic Sequence
cctcgtcatg

SEQ ID NO: 7237 - DNA, 10 bp, Artificial Sequence
  Synthetic Sequence
gtagtgacgc

SEQ ID NO: 7238 - DNA, 10 bp, Artificial Sequence
  Synthetic Sequence
ccggtgaagg

SEQ ID NO: 7239 - DNA, 10 bp, Artificial Sequence
  Synthetic Sequence
ttgagtcggc

SEQ ID NO: 7240 - DNA, 10 bp, Artificial Sequence
  Synthetic Sequence
cgccgattgg

SEQ ID NO: 7241 - DNA, 10 bp, Artificial Sequence
  Synthetic Sequence
aaatacgcat

SEQ ID NO: 7242 - DNA, 10 bp, Artificial Sequence
  Synthetic Sequence
atgttaatgt

SEQ ID NO: 7243 - DNA, 10 bp, Artificial Sequence
  Synthetic Sequence
ttcagcacga

SEQ ID NO: 7244 - DNA, 10 bp, Artificial Sequence
  Synthetic Sequence
aagactatag

SEQ ID NO: 7245 - DNA, 10 bp, Artificial Sequence
  Synthetic Sequence
acggtcatct

SEQ ID NO: 7246 - DNA, 10 bp, Artificial Sequence
  Synthetic Sequence
cgagattcgc

SEQ ID NO: 7247 - DNA, 10 bp, Artificial Sequence
  Synthetic Sequence
tgaaacgagt

SEQ ID NO: 7248 - DNA, 10 bp, Artificial Sequence
  Synthetic Sequence
ctctataaac

SEQ ID NO: 7249 - DNA, 10 bp, Artificial Sequence
  Synthetic Sequence
gtgctgacgg

SEQ ID NO: 7250 - DNA, 10 bp, Artificial Sequence
  Synthetic Sequence
tatatttccc

SEQ ID NO: 7251 - DNA, 10 bp, Artificial Sequence
  Synthetic Sequence
cccatataga

SEQ ID NO: 7252 - DNA, 10 bp, Artificial Sequence
  Synthetic Sequence
tacattataa

SEQ ID NO: 7253 - DNA, 10 bp, Artificial Sequence
  Synthetic Sequence
cctacgaaag

SEQ ID NO: 7254 - DNA, 10 bp, Artificial Sequence
  Synthetic Sequence
actctgctcc

SEQ ID NO: 7255 - DNA, 10 bp, Artificial Sequence
  Synthetic Sequence
cattatttca

SEQ ID NO: 7256 - DNA, 10 bp, Artificial Sequence
  Synthetic Sequence
agacgttaac

SEQ ID NO: 7257 - DNA, 10 bp, Artificial Sequence
  Synthetic Sequence
cttagcgtac

SEQ ID NO: 7258 - DNA, 10 bp, Artificial Sequence
  Synthetic Sequence
caataactca

SEQ ID NO: 7259 - DNA, 10 bp, Artificial Sequence
  Synthetic Sequence
ggcagttagc

SEQ ID NO: 7260 - DNA, 10 bp, Artificial Sequence
  Synthetic Sequence
gcaaacgccg

SEQ ID NO: 7261 - DNA, 10 bp, Artificial Sequence
  Synthetic Sequence
cggcgagtga

SEQ ID NO: 7262 - DNA, 10 bp, Artificial Sequence
  Synthetic Sequence
tcctcgttac

SEQ ID NO: 7263 - DNA, 10 bp, Artificial Sequence
  Synthetic Sequence
agttatggat

SEQ ID NO: 7264 - DNA, 10 bp, Artificial Sequence
  Synthetic Sequence
gccctataaa

SEQ ID NO: 7265 - DNA, 10 bp, Artificial Sequence
  Synthetic Sequence
gtgcacgcgt

SEQ ID NO: 7266 - DNA, 10 bp, Artificial Sequence
  Synthetic Sequence
aaatgcgagt

SEQ ID NO: 7267 - DNA, 10 bp, Artificial Sequence
  Synthetic Sequence
ctagcgctgg

SEQ ID NO: 7268 - DNA, 10 bp, Artificial Sequence
  Synthetic Sequence
gggtgatgtt

SEQ ID NO: 7269 - DNA, 10 bp, Artificial Sequence
  Synthetic Sequence
atttgccctg

SEQ ID NO: 7270 - DNA, 10 bp, Artificial Sequence
  Synthetic Sequence
ctgcaagttt

SEQ ID NO: 7271 - DNA, 10 bp, Artificial Sequence
  Synthetic Sequence
ttcaccggca

SEQ ID NO: 7272 - DNA, 10 bp, Artificial Sequence
  Synthetic Sequence
tctcatcctg

SEQ ID NO: 7273 - DNA, 10 bp, Artificial Sequence
  Synthetic Sequence
tgttagccag

SEQ ID NO: 7274 - DNA, 10 bp, Artificial Sequence
  Synthetic Sequence
tagattacta

SEQ ID NO: 7275 - DNA, 10 bp, Artificial Sequence
  Synthetic Sequence
tgtcaatgga

SEQ ID NO: 7276 - DNA, 10 bp, Artificial Sequence
  Synthetic Sequence
cgccgcttta

SEQ ID NO: 7277 - DNA, 10 bp, Artificial Sequence
  Synthetic Sequence
ggactacgat

SEQ ID NO: 7278 - DNA, 10 bp, Artificial Sequence
  Synthetic Sequence
ggaggttgcg

SEQ ID NO: 7279 - DNA, 10 bp, Artificial Sequence
  Synthetic Sequence
atcagaccac

SEQ ID NO: 7280 - DNA, 10 bp, Artificial Sequence
  Synthetic Sequence
ctgcgcacac

SEQ ID NO: 7281 - DNA, 10 bp, Artificial Sequence
  Synthetic Sequence
atttacattt

SEQ ID NO: 7282 - DNA, 10 bp, Artificial Sequence
  Synthetic Sequence
cctaagcggc

SEQ ID NO: 7283 - DNA, 10 bp, Artificial Sequence
  Synthetic Sequence
attgggtggc

SEQ ID NO: 7284 - DNA, 10 bp, Artificial Sequence
  Synthetic Sequence
ccctatatgt

SEQ ID NO: 7285 - DNA, 10 bp, Artificial Sequence
  Synthetic Sequence
tcccatagtc

SEQ ID NO: 7286 - DNA, 10 bp, Artificial Sequence
  Synthetic Sequence
tgggagtaat

SEQ ID NO: 7287 - DNA, 10 bp, Artificial Sequence
  Synthetic Sequence
ttggtgcgca

SEQ ID NO: 7288 - DNA, 10 bp, Artificial Sequence
  Synthetic Sequence
ctttctgcac

SEQ ID NO: 7289 - DNA, 10 bp, Artificial Sequence
  Synthetic Sequence
cgggcgtgtt

SEQ ID NO: 7290 - DNA, 10 bp, Artificial Sequence
  Synthetic Sequence
tgtttgaacc

SEQ ID NO: 7291 - DNA, 10 bp, Artificial Sequence
  Synthetic Sequence
agaaagaaag

SEQ ID NO: 7292 - DNA, 10 bp, Artificial Sequence
  Synthetic Sequence
cctgagactg

SEQ ID NO: 7293 - DNA, 10 bp, Artificial Sequence
  Synthetic Sequence
gctaacagtc

SEQ ID NO: 7294 - DNA, 10 bp, Artificial Sequence
  Synthetic Sequence
tgtaagtcgg

SEQ ID NO: 7295 - DNA, 10 bp, Artificial Sequence
  Synthetic Sequence
tgcgatgcga

SEQ ID NO: 7296 - DNA, 10 bp, Artificial Sequence
  Synthetic Sequence
ctgctcgctg

SEQ ID NO: 7297 - DNA, 10 bp, Artificial Sequence
  Synthetic Sequence
ctatgattgc

SEQ ID NO: 7298 - DNA, 10 bp, Artificial Sequence
  Synthetic Sequence
ttcttgtcat

SEQ ID NO: 7299 - DNA, 10 bp, Artificial Sequence
  Synthetic Sequence
cactccagag

SEQ ID NO: 7300 - DNA, 10 bp, Artificial Sequence
  Synthetic Sequence
atcgggagcc

SEQ ID NO: 7301 - DNA, 10 bp, Artificial Sequence
  Synthetic Sequence
agctgtcgtg

SEQ ID NO: 7302 - DNA, 10 bp, Artificial Sequence
  Synthetic Sequence
ttacataaac

SEQ ID NO: 7303 - DNA, 10 bp, Artificial Sequence
  Synthetic Sequence
aagagctgta

SEQ ID NO: 7304 - DNA, 10 bp, Artificial Sequence
  Synthetic Sequence
tgtgggatga

SEQ ID NO: 7305 - DNA, 10 bp, Artificial Sequence
  Synthetic Sequence
agaatccttc

SEQ ID NO: 7306 - DNA, 10 bp, Artificial Sequence
  Synthetic Sequence
gctagccata

SEQ ID NO: 7307 - DNA, 10 bp, Artificial Sequence
  Synthetic Sequence
gctaacacga

SEQ ID NO: 7308 - DNA, 10 bp, Artificial Sequence
  Synthetic Sequence
caggtgctgg

SEQ ID NO: 7309 - DNA, 10 bp, Artificial Sequence
  Synthetic Sequence
cggctcaatc

SEQ ID NO: 7310 - DNA, 10 bp, Artificial Sequence
  Synthetic Sequence
cttgaatcat

SEQ ID NO: 7311 - DNA, 10 bp, Artificial Sequence
  Synthetic Sequence
aggcaggtgt

SEQ ID NO: 7312 - DNA, 10 bp, Artificial Sequence
  Synthetic Sequence
aaacccgaga

SEQ ID NO: 7313 - DNA, 10 bp, Artificial Sequence
  Synthetic Sequence
gctaactaat

SEQ ID NO: 7314 - DNA, 10 bp, Artificial Sequence
  Synthetic Sequence
tttagaaaga

SEQ ID NO: 7315 - DNA, 10 bp, Artificial Sequence
  Synthetic Sequence
aggtattatc

SEQ ID NO: 7316 - DNA, 10 bp, Artificial Sequence
  Synthetic Sequence
ccactgcgct

SEQ ID NO: 7317 - DNA, 10 bp, Artificial Sequence
  Synthetic Sequence
tccacatact

SEQ ID NO: 7318 - DNA, 10 bp, Artificial Sequence
  Synthetic Sequence
tctaaggccc

SEQ ID NO: 7319 - DNA, 10 bp, Artificial Sequence
  Synthetic Sequence
tatccggtca

SEQ ID NO: 7320 - DNA, 10 bp, Artificial Sequence
  Synthetic Sequence
cccgttacgt

SEQ ID NO: 7321 - DNA, 10 bp, Artificial Sequence
  Synthetic Sequence
tggtcggatg

SEQ ID NO: 7322 - DNA, 10 bp, Artificial Sequence
  Synthetic Sequence
attggtgtgt

SEQ ID NO: 7323 - DNA, 10 bp, Artificial Sequence
  Synthetic Sequence
acgcgcaaac

SEQ ID NO: 7324 - DNA, 10 bp, Artificial Sequence
  Synthetic Sequence
aagcggagag

SEQ ID NO: 7325 - DNA, 10 bp, Artificial Sequence
  Synthetic Sequence
tgtgtacatg

SEQ ID NO: 7326 - DNA, 10 bp, Artificial Sequence
  Synthetic Sequence
taggtcacga

SEQ ID NO: 7327 - DNA, 10 bp, Artificial Sequence
  Synthetic Sequence
agttgatgtg

SEQ ID NO: 7328 - DNA, 10 bp, Artificial Sequence
  Synthetic Sequence
caattcgccg

SEQ ID NO: 7329 - DNA, 10 bp, Artificial Sequence
  Synthetic Sequence
atagttggta

SEQ ID NO: 7330 - DNA, 10 bp, Artificial Sequence
  Synthetic Sequence
agtcgtcaaa

SEQ ID NO: 7331 - DNA, 10 bp, Artificial Sequence
  Synthetic Sequence
ggtacgtgtt

SEQ ID NO: 7332 - DNA, 10 bp, Artificial Sequence
  Synthetic Sequence
agtcgatgac

SEQ ID NO: 7333 - DNA, 10 bp, Artificial Sequence
  Synthetic Sequence
cttcgtgtta

SEQ ID NO: 7334 - DNA, 10 bp, Artificial Sequence
  Synthetic Sequence
cacatacacc

SEQ ID NO: 7335 - DNA, 10 bp, Artificial Sequence
  Synthetic Sequence
gcccttgctc

SEQ ID NO: 7336 - DNA, 10 bp, Artificial Sequence
  Synthetic Sequence
tgttcgggca

SEQ ID NO: 7337 - DNA, 10 bp, Artificial Sequence
  Synthetic Sequence
tcgcgatcgt

SEQ ID NO: 7338 - DNA, 10 bp, Artificial Sequence
  Synthetic Sequence
caagccgaat

SEQ ID NO: 7339 - DNA, 10 bp, Artificial Sequence
  Synthetic Sequence
atgaacctac

SEQ ID NO: 7340 - DNA, 10 bp, Artificial Sequence
  Synthetic Sequence
tgcctagagg

SEQ ID NO: 7341 - DNA, 10 bp, Artificial Sequence
  Synthetic Sequence
gcccggattc

SEQ ID NO: 7342 - DNA, 10 bp, Artificial Sequence
  Synthetic Sequence
ctgctgcgat

SEQ ID NO: 7343 - DNA, 10 bp, Artificial Sequence
  Synthetic Sequence
ggcgaatgct

SEQ ID NO: 7344 - DNA, 10 bp, Artificial Sequence
  Synthetic Sequence
tagtcgtgct

SEQ ID NO: 7345 - DNA, 10 bp, Artificial Sequence
  Synthetic Sequence
gttctgttat

SEQ ID NO: 7346 - DNA, 10 bp, Artificial Sequence
  Synthetic Sequence
acggacttca

SEQ ID NO: 7347 - DNA, 10 bp, Artificial Sequence
  Synthetic Sequence
agcacgtcag

SEQ ID NO: 7348 - DNA, 10 bp, Artificial Sequence
  Synthetic Sequence
catccaagtg

SEQ ID NO: 7349 - DNA, 10 bp, Artificial Sequence
  Synthetic Sequence
ttgcgagaag

SEQ ID NO: 7350 - DNA, 10 bp, Artificial Sequence
  Synthetic Sequence
tattacagta

SEQ ID NO: 7351 - DNA, 10 bp, Artificial Sequence
  Synthetic Sequence
ggcatccttg

SEQ ID NO: 7352 - DNA, 10 bp, Artificial Sequence
  Synthetic Sequence
cgcacgaaac

SEQ ID NO: 7353 - DNA, 10 bp, Artificial Sequence
  Synthetic Sequence
aatattgtca

SEQ ID NO: 7354 - DNA, 10 bp, Artificial Sequence
  Synthetic Sequence
cagagctctg

SEQ ID NO: 7355 - DNA, 10 bp, Artificial Sequence
  Synthetic Sequence
tcgccgaaac

SEQ ID NO: 7356 - DNA, 10 bp, Artificial Sequence
  Synthetic Sequence
cccatcgtgg

SEQ ID NO: 7357 - DNA, 10 bp, Artificial Sequence
  Synthetic Sequence
agacatccat

SEQ ID NO: 7358 - DNA, 10 bp, Artificial Sequence
  Synthetic Sequence
ttcgtttgca

SEQ ID NO: 7359 - DNA, 10 bp, Artificial Sequence
  Synthetic Sequence
cctgcggtaa

SEQ ID NO: 7360 - DNA, 10 bp, Artificial Sequence
  Synthetic Sequence
gcacgaacca

SEQ ID NO: 7361 - DNA, 10 bp, Artificial Sequence
  Synthetic Sequence
tggagatgaa

SEQ ID NO: 7362 - DNA, 10 bp, Artificial Sequence
  Synthetic Sequence
atgggtccat

SEQ ID NO: 7363 - DNA, 10 bp, Artificial Sequence
  Synthetic Sequence
taatagagca

SEQ ID NO: 7364 - DNA, 10 bp, Artificial Sequence
  Synthetic Sequence
atacgagtcg

SEQ ID NO: 7365 - DNA, 10 bp, Artificial Sequence
  Synthetic Sequence
tgtcgattcg

SEQ ID NO: 7366 - DNA, 10 bp, Artificial Sequence
  Synthetic Sequence
tgcaggcggt

SEQ ID NO: 7367 - DNA, 10 bp, Artificial Sequence
  Synthetic Sequence
tcggtccgag

SEQ ID NO: 7368 - DNA, 10 bp, Artificial Sequence
  Synthetic Sequence
gaggaggctg

SEQ ID NO: 7369 - DNA, 10 bp, Artificial Sequence
  Synthetic Sequence
gcgaccgaga

SEQ ID NO: 7370 - DNA, 10 bp, Artificial Sequence
  Synthetic Sequence
tacggatatg

SEQ ID NO: 7371 - DNA, 10 bp, Artificial Sequence
  Synthetic Sequence
cgctcgtcaa

SEQ ID NO: 7372 - DNA, 10 bp, Artificial Sequence
  Synthetic Sequence
gacggtgcag

SEQ ID NO: 7373 - DNA, 10 bp, Artificial Sequence
  Synthetic Sequence
tcttccaagt

SEQ ID NO: 7374 - DNA, 10 bp, Artificial Sequence
  Synthetic Sequence
tgatatttcc

SEQ ID NO: 7375 - DNA, 10 bp, Artificial Sequence
  Synthetic Sequence
gattggtatg

SEQ ID NO: 7376 - DNA, 10 bp, Artificial Sequence
  Synthetic Sequence
ccggtcgttt

SEQ ID NO: 7377 - DNA, 10 bp, Artificial Sequence
  Synthetic Sequence
tgtttcctta

SEQ ID NO: 7378 - DNA, 10 bp, Artificial Sequence
  Synthetic Sequence
cacaacgcgt

SEQ ID NO: 7379 - DNA, 10 bp, Artificial Sequence
  Synthetic Sequence
gcaagagcgg

SEQ ID NO: 7380 - DNA, 10 bp, Artificial Sequence
  Synthetic Sequence
gagtcacgtg

SEQ ID NO: 7381 - DNA, 10 bp, Artificial Sequence
  Synthetic Sequence
ggaccgaata

SEQ ID NO: 7382 - DNA, 10 bp, Artificial Sequence
  Synthetic Sequence
agtctcatag

SEQ ID NO: 7383 - DNA, 10 bp, Artificial Sequence
  Synthetic Sequence
cctagaagtt

SEQ ID NO: 7384 - DNA, 10 bp, Artificial Sequence
  Synthetic Sequence
gcgtggctat

SEQ ID NO: 7385 - DNA, 10 bp, Artificial Sequence
  Synthetic Sequence
tgactcaagt

SEQ ID NO: 7386 - DNA, 10 bp, Artificial Sequence
  Synthetic Sequence
cgggttcagt

SEQ ID NO: 7387 - DNA, 10 bp, Artificial Sequence
  Synthetic Sequence
agattggtct

SEQ ID NO: 7388 - DNA, 10 bp, Artificial Sequence
  Synthetic Sequence
taagctagcc

SEQ ID NO: 7389 - DNA, 10 bp, Artificial Sequence
  Synthetic Sequence
aatcccacaa

SEQ ID NO: 7390 - DNA, 10 bp, Artificial Sequence
  Synthetic Sequence
ttggagggag

SEQ ID NO: 7391 - DNA, 10 bp, Artificial Sequence
  Synthetic Sequence
tctacttcta

SEQ ID NO: 7392 - DNA, 10 bp, Artificial Sequence
  Synthetic Sequence
ttgcctcaca

SEQ ID NO: 7393 - DNA, 10 bp, Artificial Sequence
  Synthetic Sequence
agttcggtgc

SEQ ID NO: 7394 - DNA, 10 bp, Artificial Sequence
  Synthetic Sequence
agcacaccgc

SEQ ID NO: 7395 - DNA, 10 bp, Artificial Sequence
  Synthetic Sequence
ttcggcaccg

SEQ ID NO: 7396 - DNA, 10 bp, Artificial Sequence
  Synthetic Sequence
gttggaggag

SEQ ID NO: 7397 - DNA, 10 bp, Artificial Sequence
  Synthetic Sequence
tagtcctcgg

SEQ ID NO: 7398 - DNA, 10 bp, Artificial Sequence
  Synthetic Sequence
tggtagtgaa

SEQ ID NO: 7399 - DNA, 10 bp, Artificial Sequence
  Synthetic Sequence
tccataccaa

SEQ ID NO: 7400 - DNA, 10 bp, Artificial Sequence
  Synthetic Sequence
ctgagatcgg

SEQ ID NO: 7401 - DNA, 10 bp, Artificial Sequence
  Synthetic Sequence
cggcatgtgg

SEQ ID NO: 7402 - DNA, 10 bp, Artificial Sequence
  Synthetic Sequence
tgtctttggg

SEQ ID NO: 7403 - DNA, 10 bp, Artificial Sequence
  Synthetic Sequence
atgtgtaaag

SEQ ID NO: 7404 - DNA, 10 bp, Artificial Sequence
  Synthetic Sequence
agccaaagaa

SEQ ID NO: 7405 - DNA, 10 bp, Artificial Sequence
  Synthetic Sequence
ggaactcatt

SEQ ID NO: 7406 - DNA, 10 bp, Artificial Sequence
  Synthetic Sequence
ggtgccatca

SEQ ID NO: 7407 - DNA, 10 bp, Artificial Sequence
  Synthetic Sequence
ccgaatatag

SEQ ID NO: 7408 - DNA, 10 bp, Artificial Sequence
  Synthetic Sequence
tataatgaac

SEQ ID NO: 7409 - DNA, 10 bp, Artificial Sequence
  Synthetic Sequence
ggaccggtga

SEQ ID NO: 7410 - DNA, 10 bp, Artificial Sequence
  Synthetic Sequence
tcaagaagga

SEQ ID NO: 7411 - DNA, 10 bp, Artificial Sequence
  Synthetic Sequence
tatctaacta

SEQ ID NO: 7412 - DNA, 10 bp, Artificial Sequence
  Synthetic Sequence
gcgtttagga

SEQ ID NO: 7413 - DNA, 10 bp, Artificial Sequence
  Synthetic Sequence
tgtgagaccc

SEQ ID NO: 7414 - DNA, 10 bp, Artificial Sequence
  Synthetic Sequence
cgggactaca

SEQ ID NO: 7415 - DNA, 10 bp, Artificial Sequence
  Synthetic Sequence
tgccgacgac

SEQ ID NO: 7416 - DNA, 10 bp, Artificial Sequence
  Synthetic Sequence
aatacattgt

SEQ ID NO: 7417 - DNA, 10 bp, Artificial Sequence
  Synthetic Sequence
actggtccca

SEQ ID NO: 7418 - DNA, 10 bp, Artificial Sequence
  Synthetic Sequence
tgcagatctt

SEQ ID NO: 7419 - DNA, 10 bp, Artificial Sequence
  Synthetic Sequence
cccagctatg

SEQ ID NO: 7420 - DNA, 10 bp, Artificial Sequence
  Synthetic Sequence
ccgatcacca

SEQ ID NO: 7421 - DNA, 10 bp, Artificial Sequence
  Synthetic Sequence
agcaaatctc

SEQ ID NO: 7422 - DNA, 10 bp, Artificial Sequence
  Synthetic Sequence
cgagtccctc

SEQ ID NO: 7423 - DNA, 10 bp, Artificial Sequence
  Synthetic Sequence
gattgcagac

SEQ ID NO: 7424 - DNA, 10 bp, Artificial Sequence
  Synthetic Sequence
ttattcagat

SEQ ID NO: 7425 - DNA, 10 bp, Artificial Sequence
  Synthetic Sequence
tgcgcatacc

SEQ ID NO: 7426 - DNA, 10 bp, Artificial Sequence
  Synthetic Sequence
cctctgtcgc

SEQ ID NO: 7427 - DNA, 10 bp, Artificial Sequence
  Synthetic Sequence
cggcagcatg

SEQ ID NO: 7428 - DNA, 10 bp, Artificial Sequence
  Synthetic Sequence
tgtaaattgt

SEQ ID NO: 7429 - DNA, 10 bp, Artificial Sequence
  Synthetic Sequence
tctgtcttgt

SEQ ID NO: 7430 - DNA, 10 bp, Artificial Sequence
  Synthetic Sequence
ccgcgcctta

SEQ ID NO: 7431 - DNA, 10 bp, Artificial Sequence
  Synthetic Sequence
cagtcaaagc

SEQ ID NO: 7432 - DNA, 10 bp, Artificial Sequence
  Synthetic Sequence
attatcagtc

SEQ ID NO: 7433 - DNA, 10 bp, Artificial Sequence
  Synthetic Sequence
attgaagccg

SEQ ID NO: 7434 - DNA, 10 bp, Artificial Sequence
  Synthetic Sequence
actagagctc

SEQ ID NO: 7435 - DNA, 10 bp, Artificial Sequence
  Synthetic Sequence
tcttcttgaa

SEQ ID NO: 7436 - DNA, 10 bp, Artificial Sequence
  Synthetic Sequence
caacccgacg

SEQ ID NO: 7437 - DNA, 10 bp, Artificial Sequence
  Synthetic Sequence
cagtaccgca

SEQ ID NO: 7438 - DNA, 10 bp, Artificial Sequence
  Synthetic Sequence
aacccatacc

SEQ ID NO: 7439 - DNA, 10 bp, Artificial Sequence
  Synthetic Sequence
tccacaatat

SEQ ID NO: 7440 - DNA, 10 bp, Artificial Sequence
  Synthetic Sequence
ttcatactac

SEQ ID NO: 7441 - DNA, 10 bp, Artificial Sequence
  Synthetic Sequence
ctgaacgtca

SEQ ID NO: 7442 - DNA, 10 bp, Artificial Sequence
  Synthetic Sequence
ggcttggcca

SEQ ID NO: 7443 - DNA, 10 bp, Artificial Sequence
  Synthetic Sequence
ccaaatggcc

SEQ ID NO: 7444 - DNA, 10 bp, Artificial Sequence
  Synthetic Sequence
actagcgcaa

SEQ ID NO: 7445 - DNA, 10 bp, Artificial Sequence
  Synthetic Sequence
atgagggtct

SEQ ID NO: 7446 - DNA, 10 bp, Artificial Sequence
  Synthetic Sequence
ctagcataag

SEQ ID NO: 7447 - DNA, 10 bp, Artificial Sequence
  Synthetic Sequence
agaacgaaca

SEQ ID NO: 7448 - DNA, 10 bp, Artificial Sequence
  Synthetic Sequence
ttcgaagtta

SEQ ID NO: 7449 - DNA, 10 bp, Artificial Sequence
  Synthetic Sequence
cctatttctg

SEQ ID NO: 7450 - DNA, 10 bp, Artificial Sequence
  Synthetic Sequence
ggtcaggagg

SEQ ID NO: 7451 - DNA, 10 bp, Artificial Sequence
  Synthetic Sequence
tgagcgcgct

SEQ ID NO: 7452 - DNA, 10 bp, Artificial Sequence
  Synthetic Sequence
atgaaagatc

SEQ ID NO: 7453 - DNA, 10 bp, Artificial Sequence
  Synthetic Sequence
aattacgagg

SEQ ID NO: 7454 - DNA, 10 bp, Artificial Sequence
  Synthetic Sequence
tcagattcga

SEQ ID NO: 7455 - DNA, 10 bp, Artificial Sequence
  Synthetic Sequence
gggacttaac

SEQ ID NO: 7456 - DNA, 10 bp, Artificial Sequence
  Synthetic Sequence
cgtacaagaa

SEQ ID NO: 7457 - DNA, 10 bp, Artificial Sequence
  Synthetic Sequence
ttgtaccagt

SEQ ID NO: 7458 - DNA, 10 bp, Artificial Sequence
  Synthetic Sequence
gacggattta

SEQ ID NO: 7459 - DNA, 10 bp, Artificial Sequence
  Synthetic Sequence
ctgtcgttga

SEQ ID NO: 7460 - DNA, 10 bp, Artificial Sequence
  Synthetic Sequence
cgaaggaggc

SEQ ID NO: 7461 - DNA, 10 bp, Artificial Sequence
  Synthetic Sequence
tgggttcttc

SEQ ID NO: 7462 - DNA, 10 bp, Artificial Sequence
  Synthetic Sequence
gcatgaaaga

SEQ ID NO: 7463 - DNA, 10 bp, Artificial Sequence
  Synthetic Sequence
tctatggttc

SEQ ID NO: 7464 - DNA, 10 bp, Artificial Sequence
  Synthetic Sequence
cgcactatca

SEQ ID NO: 7465 - DNA, 10 bp, Artificial Sequence
  Synthetic Sequence
gaatgggccc

SEQ ID NO: 7466 - DNA, 10 bp, Artificial Sequence
  Synthetic Sequence
cctcaaacag

SEQ ID NO: 7467 - DNA, 10 bp, Artificial Sequence
  Synthetic Sequence
atcgatgcat

SEQ ID NO: 7468 - DNA, 10 bp, Artificial Sequence
  Synthetic Sequence
agagtgtccg

SEQ ID NO: 7469 - DNA, 10 bp, Artificial Sequence
  Synthetic Sequence
tgagaagttt

SEQ ID NO: 7470 - DNA, 10 bp, Artificial Sequence
  Synthetic Sequence
tagctaccaa

SEQ ID NO: 7471 - DNA, 10 bp, Artificial Sequence
  Synthetic Sequence
tgcccgtcca

SEQ ID NO: 7472 - DNA, 10 bp, Artificial Sequence
  Synthetic Sequence
gattatcgtc

SEQ ID NO: 7473 - DNA, 10 bp, Artificial Sequence
  Synthetic Sequence
tcctaggaat

SEQ ID NO: 7474 - DNA, 10 bp, Artificial Sequence
  Synthetic Sequence
tcaaaccgta

SEQ ID NO: 7475 - DNA, 10 bp, Artificial Sequence
  Synthetic Sequence
atcacaatcg

SEQ ID NO: 7476 - DNA, 10 bp, Artificial Sequence
  Synthetic Sequence
cagctaaacg

SEQ ID NO: 7477 - DNA, 10 bp, Artificial Sequence
  Synthetic Sequence
atgtaacaat

SEQ ID NO: 7478 - DNA, 10 bp, Artificial Sequence
  Synthetic Sequence
tcgtcctaca

SEQ ID NO: 7479 - DNA, 10 bp, Artificial Sequence
  Synthetic Sequence
cgattcctca

SEQ ID NO: 7480 - DNA, 10 bp, Artificial Sequence
  Synthetic Sequence
aatctccttt

SEQ ID NO: 7481 - DNA, 10 bp, Artificial Sequence
  Synthetic Sequence
cagcggttcc

SEQ ID NO: 7482 - DNA, 10 bp, Artificial Sequence
  Synthetic Sequence
gcggcaaact

SEQ ID NO: 7483 - DNA, 10 bp, Artificial Sequence
  Synthetic Sequence
tctgaccgac

SEQ ID NO: 7484 - DNA, 10 bp, Artificial Sequence
  Synthetic Sequence
gatggtctac

SEQ ID NO: 7485 - DNA, 10 bp, Artificial Sequence
  Synthetic Sequence
tactgacggt

SEQ ID NO: 7486 - DNA, 10 bp, Artificial Sequence
  Synthetic Sequence
ttccagactt

SEQ ID NO: 7487 - DNA, 10 bp, Artificial Sequence
  Synthetic Sequence
tttcaaggtg

SEQ ID NO: 7488 - DNA, 10 bp, Artificial Sequence
  Synthetic Sequence
gcatgatccg

SEQ ID NO: 7489 - DNA, 10 bp, Artificial Sequence
  Synthetic Sequence
attatccagg

SEQ ID NO: 7490 - DNA, 10 bp, Artificial Sequence
  Synthetic Sequence
caatccgcgt

SEQ ID NO: 7491 - DNA, 10 bp, Artificial Sequence
  Synthetic Sequence
gatgtggtcg

SEQ ID NO: 7492 - DNA, 10 bp, Artificial Sequence
  Synthetic Sequence
gaagggagag

SEQ ID NO: 7493 - DNA, 10 bp, Artificial Sequence
  Synthetic Sequence
ccctacgagt

SEQ ID NO: 7494 - DNA, 10 bp, Artificial Sequence
  Synthetic Sequence
acactggctc

SEQ ID NO: 7495 - DNA, 10 bp, Artificial Sequence
  Synthetic Sequence
tacttgaaag

SEQ ID NO: 7496 - DNA, 10 bp, Artificial Sequence
  Synthetic Sequence
ataattgttt

SEQ ID NO: 7497 - DNA, 10 bp, Artificial Sequence
  Synthetic Sequence
tccgttgact

SEQ ID NO: 7498 - DNA, 10 bp, Artificial Sequence
  Synthetic Sequence
attcaacact

SEQ ID NO: 7499 - DNA, 10 bp, Artificial Sequence
  Synthetic Sequence
agactgaacc

SEQ ID NO: 7500 - DNA, 10 bp, Artificial Sequence
  Synthetic Sequence
gcggaattta

SEQ ID NO: 7501 - DNA, 10 bp, Artificial Sequence
  Synthetic Sequence
acgtacagag

SEQ ID NO: 7502 - DNA, 10 bp, Artificial Sequence
  Synthetic Sequence
gtgactcgtt

SEQ ID NO: 7503 - DNA, 10 bp, Artificial Sequence
  Synthetic Sequence
gcacagacag

SEQ ID NO: 7504 - DNA, 10 bp, Artificial Sequence
  Synthetic Sequence
ttgcgcaggc

SEQ ID NO: 7505 - DNA, 10 bp, Artificial Sequence
  Synthetic Sequence
acttaccgcg

SEQ ID NO: 7506 - DNA, 10 bp, Artificial Sequence
  Synthetic Sequence
cctctccaca

SEQ ID NO: 7507 - DNA, 10 bp, Artificial Sequence
  Synthetic Sequence
ttccagagag

SEQ ID NO: 7508 - DNA, 10 bp, Artificial Sequence
  Synthetic Sequence
cttccacaag

SEQ ID NO: 7509 - DNA, 10 bp, Artificial Sequence
  Synthetic Sequence
tttctcacaa

SEQ ID NO: 7510 - DNA, 10 bp, Artificial Sequence
  Synthetic Sequence
aaagggagct

SEQ ID NO: 7511 - DNA, 10 bp, Artificial Sequence
  Synthetic Sequence
gcggccatta

SEQ ID NO: 7512 - DNA, 10 bp, Artificial Sequence
  Synthetic Sequence
acgaactccg

SEQ ID NO: 7513 - DNA, 10 bp, Artificial Sequence
  Synthetic Sequence
gactatccca

SEQ ID NO: 7514 - DNA, 10 bp, Artificial Sequence
  Synthetic Sequence
tgcttcgatc

SEQ ID NO: 7515 - DNA, 10 bp, Artificial Sequence
  Synthetic Sequence
cagcgatcac

SEQ ID NO: 7516 - DNA, 10 bp, Artificial Sequence
  Synthetic Sequence
tccttgccgt

SEQ ID NO: 7517 - DNA, 10 bp, Artificial Sequence
  Synthetic Sequence
tgccgggcaa

SEQ ID NO: 7518 - DNA, 10 bp, Artificial Sequence
  Synthetic Sequence
ggaaactgac

SEQ ID NO: 7519 - DNA, 10 bp, Artificial Sequence
  Synthetic Sequence
cgcctacctt

SEQ ID NO: 7520 - DNA, 10 bp, Artificial Sequence
  Synthetic Sequence
tatggtcgca

SEQ ID NO: 7521 - DNA, 10 bp, Artificial Sequence
  Synthetic Sequence
cgaataatag

SEQ ID NO: 7522 - DNA, 10 bp, Artificial Sequence
  Synthetic Sequence
caggcatctg

SEQ ID NO: 7523 - DNA, 10 bp, Artificial Sequence
  Synthetic Sequence
gatgaaggtg

SEQ ID NO: 7524 - DNA, 10 bp, Artificial Sequence
  Synthetic Sequence
gagtgtttcg

SEQ ID NO: 7525 - DNA, 10 bp, Artificial Sequence
  Synthetic Sequence
gtcacagccc

SEQ ID NO: 7526 - DNA, 10 bp, Artificial Sequence
  Synthetic Sequence
cggtctccga

SEQ ID NO: 7527 - DNA, 10 bp, Artificial Sequence
  Synthetic Sequence
tgtcagccga

SEQ ID NO: 7528 - DNA, 10 bp, Artificial Sequence
  Synthetic Sequence
cacctctaac

SEQ ID NO: 7529 - DNA, 10 bp, Artificial Sequence
  Synthetic Sequence
cacaaagctc

SEQ ID NO: 7530 - DNA, 10 bp, Artificial Sequence
  Synthetic Sequence
caatcttacc

SEQ ID NO: 7531 - DNA, 10 bp, Artificial Sequence
  Synthetic Sequence
tccctattac

SEQ ID NO: 7532 - DNA, 10 bp, Artificial Sequence
  Synthetic Sequence
acgttgatgc

SEQ ID NO: 7533 - DNA, 10 bp, Artificial Sequence
  Synthetic Sequence
gccaaggcga

SEQ ID NO: 7534 - DNA, 10 bp, Artificial Sequence
  Synthetic Sequence
gaatgcactt

SEQ ID NO: 7535 - DNA, 10 bp, Artificial Sequence
  Synthetic Sequence
gtgccgacac

SEQ ID NO: 7536 - DNA, 10 bp, Artificial Sequence
  Synthetic Sequence
taacagcata

SEQ ID NO: 7537 - DNA, 10 bp, Artificial Sequence
  Synthetic Sequence
atatcatcag

SEQ ID NO: 7538 - DNA, 10 bp, Artificial Sequence
  Synthetic Sequence
tattagcgtg

SEQ ID NO: 7539 - DNA, 10 bp, Artificial Sequence
  Synthetic Sequence
cggctgctga

SEQ ID NO: 7540 - DNA, 10 bp, Artificial Sequence
  Synthetic Sequence
ctctgaagcg

SEQ ID NO: 7541 - DNA, 10 bp, Artificial Sequence
  Synthetic Sequence
catctgagag

SEQ ID NO: 7542 - DNA, 10 bp, Artificial Sequence
  Synthetic Sequence
tcctgacctc

SEQ ID NO: 7543 - DNA, 10 bp, Artificial Sequence
  Synthetic Sequence
ttctcctgtg

SEQ ID NO: 7544 - DNA, 10 bp, Artificial Sequence
  Synthetic Sequence
cgcgtatgaa

SEQ ID NO: 7545 - DNA, 10 bp, Artificial Sequence
  Synthetic Sequence
ttaacgatat

SEQ ID NO: 7546 - DNA, 10 bp, Artificial Sequence
  Synthetic Sequence
tccgaacgat

SEQ ID NO: 7547 - DNA, 10 bp, Artificial Sequence
  Synthetic Sequence
gaggtcacag

SEQ ID NO: 7548 - DNA, 10 bp, Artificial Sequence
  Synthetic Sequence
gaaagaaggc

SEQ ID NO: 7549 - DNA, 10 bp, Artificial Sequence
  Synthetic Sequence
tcagcgtgaa

SEQ ID NO: 7550 - DNA, 10 bp, Artificial Sequence
  Synthetic Sequence
ggcgcttgga

SEQ ID NO: 7551 - DNA, 10 bp, Artificial Sequence
  Synthetic Sequence
gttataaggg

SEQ ID NO: 7552 - DNA, 10 bp, Artificial Sequence
  Synthetic Sequence
gtgatcttgc

SEQ ID NO: 7553 - DNA, 10 bp, Artificial Sequence
  Synthetic Sequence
aaacgagcta

SEQ ID NO: 7554 - DNA, 10 bp, Artificial Sequence
  Synthetic Sequence
gtcgattagc

SEQ ID NO: 7555 - DNA, 10 bp, Artificial Sequence
  Synthetic Sequence
ttaacaagca

SEQ ID NO: 7556 - DNA, 10 bp, Artificial Sequence
  Synthetic Sequence
caacttagat

SEQ ID NO: 7557 - DNA, 10 bp, Artificial Sequence
  Synthetic Sequence
tcacaaacaa

SEQ ID NO: 7558 - DNA, 10 bp, Artificial Sequence
  Synthetic Sequence
gtaacttata

SEQ ID NO: 7559 - DNA, 10 bp, Artificial Sequence
  Synthetic Sequence
ggttaacggg

SEQ ID NO: 7560 - DNA, 10 bp, Artificial Sequence
  Synthetic Sequence
gtccactaat

SEQ ID NO: 7561 - DNA, 10 bp, Artificial Sequence
  Synthetic Sequence
ctgaaagaga

SEQ ID NO: 7562 - DNA, 10 bp, Artificial Sequence
  Synthetic Sequence
caactgggcg

SEQ ID NO: 7563 - DNA, 10 bp, Artificial Sequence
  Synthetic Sequence
gataatttct

SEQ ID NO: 7564 - DNA, 10 bp, Artificial Sequence
  Synthetic Sequence
taaccgtgtt

SEQ ID NO: 7565 - DNA, 10 bp, Artificial Sequence
  Synthetic Sequence
atcgctaatc

SEQ ID NO: 7566 - DNA, 10 bp, Artificial Sequence
  Synthetic Sequence
ggactgcatg

SEQ ID NO: 7567 - DNA, 10 bp, Artificial Sequence
  Synthetic Sequence
acaaggtcct

SEQ ID NO: 7568 - DNA, 10 bp, Artificial Sequence
  Synthetic Sequence
accgattgtt

SEQ ID NO: 7569 - DNA, 10 bp, Artificial Sequence
  Synthetic Sequence
atgtacgaag

SEQ ID NO: 7570 - DNA, 10 bp, Artificial Sequence
  Synthetic Sequence
gttatctgaa

SEQ ID NO: 7571 - DNA, 10 bp, Artificial Sequence
  Synthetic Sequence
cccgtgcttg

SEQ ID NO: 7572 - DNA, 10 bp, Artificial Sequence
  Synthetic Sequence
agtcgaaatc

SEQ ID NO: 7573 - DNA, 10 bp, Artificial Sequence
  Synthetic Sequence
ttatactgct

SEQ ID NO: 7574 - DNA, 10 bp, Artificial Sequence
  Synthetic Sequence
gagtcacaga

SEQ ID NO: 7575 - DNA, 10 bp, Artificial Sequence
  Synthetic Sequence
ttgaccgtat

SEQ ID NO: 7576 - DNA, 10 bp, Artificial Sequence
  Synthetic Sequence
cacgcaaact

SEQ ID NO: 7577 - DNA, 10 bp, Artificial Sequence
  Synthetic Sequence
gagcgcttca

SEQ ID NO: 7578 - DNA, 10 bp, Artificial Sequence
  Synthetic Sequence
aatgccttaa

SEQ ID NO: 7579 - DNA, 10 bp, Artificial Sequence
  Synthetic Sequence
ctaggaccct

SEQ ID NO: 7580 - DNA, 10 bp, Artificial Sequence
  Synthetic Sequence
tttctccagc

SEQ ID NO: 7581 - DNA, 10 bp, Artificial Sequence
  Synthetic Sequence
actgaaatgg

SEQ ID NO: 7582 - DNA, 10 bp, Artificial Sequence
  Synthetic Sequence
ttcagaatca

SEQ ID NO: 7583 - DNA, 10 bp, Artificial Sequence
  Synthetic Sequence
accctaacag

SEQ ID NO: 7584 - DNA, 10 bp, Artificial Sequence
  Synthetic Sequence
ctggtcctct

SEQ ID NO: 7585 - DNA, 10 bp, Artificial Sequence
  Synthetic Sequence
ggttctgctg

SEQ ID NO: 7586 - DNA, 10 bp, Artificial Sequence
  Synthetic Sequence
taccgcgatc

SEQ ID NO: 7587 - DNA, 10 bp, Artificial Sequence
  Synthetic Sequence
gacaccaagc

SEQ ID NO: 7588 - DNA, 10 bp, Artificial Sequence
  Synthetic Sequence
gatttgaagg

SEQ ID NO: 7589 - DNA, 10 bp, Artificial Sequence
  Synthetic Sequence
atcgcatctg

SEQ ID NO: 7590 - DNA, 10 bp, Artificial Sequence
  Synthetic Sequence
acgcaggcag

SEQ ID NO: 7591 - DNA, 10 bp, Artificial Sequence
  Synthetic Sequence
ctgcatcctt

SEQ ID NO: 7592 - DNA, 10 bp, Artificial Sequence
  Synthetic Sequence
cagggcatcg

SEQ ID NO: 7593 - DNA, 10 bp, Artificial Sequence
  Synthetic Sequence
ctcgccagtc

SEQ ID NO: 7594 - DNA, 10 bp, Artificial Sequence
  Synthetic Sequence
agggtttgat

SEQ ID NO: 7595 - DNA, 10 bp, Artificial Sequence
  Synthetic Sequence
aagtttaaat

SEQ ID NO: 7596 - DNA, 10 bp, Artificial Sequence
  Synthetic Sequence
taagccgcac

SEQ ID NO: 7597 - DNA, 10 bp, Artificial Sequence
  Synthetic Sequence
aggttggccg

SEQ ID NO: 7598 - DNA, 10 bp, Artificial Sequence
  Synthetic Sequence
gaaacatgta

SEQ ID NO: 7599 - DNA, 10 bp, Artificial Sequence
  Synthetic Sequence
agtgactgga

SEQ ID NO: 7600 - DNA, 10 bp, Artificial Sequence
  Synthetic Sequence
tcggcccata

SEQ ID NO: 7601 - DNA, 10 bp, Artificial Sequence
  Synthetic Sequence
agctctcata

SEQ ID NO: 7602 - DNA, 10 bp, Artificial Sequence
  Synthetic Sequence
aggactcgat

SEQ ID NO: 7603 - DNA, 10 bp, Artificial Sequence
  Synthetic Sequence
ccgtagacac

SEQ ID NO: 7604 - DNA, 10 bp, Artificial Sequence
  Synthetic Sequence
gggcaactaa

SEQ ID NO: 7605 - DNA, 10 bp, Artificial Sequence
  Synthetic Sequence
gctgttatcc

SEQ ID NO: 7606 - DNA, 10 bp, Artificial Sequence
  Synthetic Sequence
cgtaggctcc

SEQ ID NO: 7607 - DNA, 10 bp, Artificial Sequence
  Synthetic Sequence
gaagaccact

SEQ ID NO: 7608 - DNA, 10 bp, Artificial Sequence
  Synthetic Sequence
cgattagcaa

SEQ ID NO: 7609 - DNA, 10 bp, Artificial Sequence
  Synthetic Sequence
gtacctcccg

SEQ ID NO: 7610 - DNA, 10 bp, Artificial Sequence
  Synthetic Sequence
caatcactgg

SEQ ID NO: 7611 - DNA, 10 bp, Artificial Sequence
  Synthetic Sequence
ttacgatgaa

SEQ ID NO: 7612 - DNA, 10 bp, Artificial Sequence
  Synthetic Sequence
acgcggttta

SEQ ID NO: 7613 - DNA, 10 bp, Artificial Sequence
  Synthetic Sequence
cgactccaat

SEQ ID NO: 7614 - DNA, 10 bp, Artificial Sequence
  Synthetic Sequence
aacaaagtgt

SEQ ID NO: 7615 - DNA, 10 bp, Artificial Sequence
  Synthetic Sequence
acaacggtac

SEQ ID NO: 7616 - DNA, 10 bp, Artificial Sequence
  Synthetic Sequence
acaactgtca

SEQ ID NO: 7617 - DNA, 10 bp, Artificial Sequence
  Synthetic Sequence
gtttggtcgc

SEQ ID NO: 7618 - DNA, 10 bp, Artificial Sequence
  Synthetic Sequence
gaagtctaac

SEQ ID NO: 7619 - DNA, 10 bp, Artificial Sequence
  Synthetic Sequence
aggccgcttc

SEQ ID NO: 7620 - DNA, 10 bp, Artificial Sequence
  Synthetic Sequence
ccgcacgaac

SEQ ID NO: 7621 - DNA, 10 bp, Artificial Sequence
  Synthetic Sequence
aaacttccaa

SEQ ID NO: 7622 - DNA, 10 bp, Artificial Sequence
  Synthetic Sequence
ccgaagcaca

SEQ ID NO: 7623 - DNA, 10 bp, Artificial Sequence
  Synthetic Sequence
gccgactgag

SEQ ID NO: 7624 - DNA, 10 bp, Artificial Sequence
  Synthetic Sequence
attggccttc

SEQ ID NO: 7625 - DNA, 10 bp, Artificial Sequence
  Synthetic Sequence
tgagccttct

SEQ ID NO: 7626 - DNA, 10 bp, Artificial Sequence
  Synthetic Sequence
ccttattgcc

SEQ ID NO: 7627 - DNA, 10 bp, Artificial Sequence
  Synthetic Sequence
actggataga

SEQ ID NO: 7628 - DNA, 10 bp, Artificial Sequence
  Synthetic Sequence
atccctcact

SEQ ID NO: 7629 - DNA, 10 bp, Artificial Sequence
  Synthetic Sequence
tccactaata

SEQ ID NO: 7630 - DNA, 10 bp, Artificial Sequence
  Synthetic Sequence
ctagcagcca

SEQ ID NO: 7631 - DNA, 10 bp, Artificial Sequence
  Synthetic Sequence
attatatcta

SEQ ID NO: 7632 - DNA, 10 bp, Artificial Sequence
  Synthetic Sequence
ctcccgtatg

SEQ ID NO: 7633 - DNA, 10 bp, Artificial Sequence
  Synthetic Sequence
accgcagtgc

SEQ ID NO: 7634 - DNA, 10 bp, Artificial Sequence
  Synthetic Sequence
ataccttagt

SEQ ID NO: 7635 - DNA, 10 bp, Artificial Sequence
  Synthetic Sequence
tatgtgtaca

SEQ ID NO: 7636 - DNA, 10 bp, Artificial Sequence
  Synthetic Sequence
gacagccggt

SEQ ID NO: 7637 - DNA, 10 bp, Artificial Sequence
  Synthetic Sequence
gccgtaaacc

SEQ ID NO: 7638 - DNA, 10 bp, Artificial Sequence
  Synthetic Sequence
gggtctttga

SEQ ID NO: 7639 - DNA, 10 bp, Artificial Sequence
  Synthetic Sequence
tgcatgtctc

SEQ ID NO: 7640 - DNA, 10 bp, Artificial Sequence
  Synthetic Sequence
gcactcgtgt

SEQ ID NO: 7641 - DNA, 10 bp, Artificial Sequence
  Synthetic Sequence
cctcaagaga

SEQ ID NO: 7642 - DNA, 10 bp, Artificial Sequence
  Synthetic Sequence
accctcccat

SEQ ID NO: 7643 - DNA, 10 bp, Artificial Sequence
  Synthetic Sequence
aaacggcact

SEQ ID NO: 7644 - DNA, 10 bp, Artificial Sequence
  Synthetic Sequence
tcgcctcgag

SEQ ID NO: 7645 - DNA, 10 bp, Artificial Sequence
  Synthetic Sequence
cttgacaagg

SEQ ID NO: 7646 - DNA, 10 bp, Artificial Sequence
  Synthetic Sequence
acagatcgcg

SEQ ID NO: 7647 - DNA, 10 bp, Artificial Sequence
  Synthetic Sequence
agcggcacaa

SEQ ID NO: 7648 - DNA, 10 bp, Artificial Sequence
  Synthetic Sequence
cggatatgta

SEQ ID NO: 7649 - DNA, 10 bp, Artificial Sequence
  Synthetic Sequence
acgttccagg

SEQ ID NO: 7650 - DNA, 10 bp, Artificial Sequence
  Synthetic Sequence
agaactcggg

SEQ ID NO: 7651 - DNA, 10 bp, Artificial Sequence
  Synthetic Sequence
gattaagcgg

SEQ ID NO: 7652 - DNA, 10 bp, Artificial Sequence
  Synthetic Sequence
ggaacgcctc

SEQ ID NO: 7653 - DNA, 10 bp, Artificial Sequence
  Synthetic Sequence
atgatactct

SEQ ID NO: 7654 - DNA, 10 bp, Artificial Sequence
  Synthetic Sequence
cggtcgagct

SEQ ID NO: 7655 - DNA, 10 bp, Artificial Sequence
  Synthetic Sequence
gtcttaagac

SEQ ID NO: 7656 - DNA, 10 bp, Artificial Sequence
  Synthetic Sequence
cctatcaggc

SEQ ID NO: 7657 - DNA, 10 bp, Artificial Sequence
  Synthetic Sequence
aactgtagcg

SEQ ID NO: 7658 - DNA, 10 bp, Artificial Sequence
  Synthetic Sequence
cttgcactcc

SEQ ID NO: 7659 - DNA, 10 bp, Artificial Sequence
  Synthetic Sequence
caacgaggca

SEQ ID NO: 7660 - DNA, 10 bp, Artificial Sequence
  Synthetic Sequence
tcgtaatcgg

SEQ ID NO: 7661 - DNA, 10 bp, Artificial Sequence
  Synthetic Sequence
gcagtttctg

SEQ ID NO: 7662 - DNA, 10 bp, Artificial Sequence
  Synthetic Sequence
ggactgatgt

SEQ ID NO: 7663 - DNA, 10 bp, Artificial Sequence
  Synthetic Sequence
gttcagcccg

SEQ ID NO: 7664 - DNA, 10 bp, Artificial Sequence
  Synthetic Sequence
aaccttaaga

SEQ ID NO: 7665 - DNA, 10 bp, Artificial Sequence
  Synthetic Sequence
cattatccta

SEQ ID NO: 7666 - DNA, 10 bp, Artificial Sequence
  Synthetic Sequence
agtagctatg

SEQ ID NO: 7667 - DNA, 10 bp, Artificial Sequence
  Synthetic Sequence
taatggcgtt

SEQ ID NO: 7668 - DNA, 10 bp, Artificial Sequence
  Synthetic Sequence
atatacgcca

SEQ ID NO: 7669 - DNA, 10 bp, Artificial Sequence
  Synthetic Sequence
gttgtcgaac

SEQ ID NO: 7670 - DNA, 10 bp, Artificial Sequence
  Synthetic Sequence
acatcaggaa

SEQ ID NO: 7671 - DNA, 10 bp, Artificial Sequence
  Synthetic Sequence
agaaggactg

SEQ ID NO: 7672 - DNA, 10 bp, Artificial Sequence
  Synthetic Sequence
atatgagagg

SEQ ID NO: 7673 - DNA, 10 bp, Artificial Sequence
  Synthetic Sequence
tactcgctcg

SEQ ID NO: 7674 - DNA, 10 bp, Artificial Sequence
  Synthetic Sequence
cttcctacgt

SEQ ID NO: 7675 - DNA, 10 bp, Artificial Sequence
  Synthetic Sequence
cgctatggag

SEQ ID NO: 7676 - DNA, 10 bp, Artificial Sequence
  Synthetic Sequence
ccgcttaaat

SEQ ID NO: 7677 - DNA, 10 bp, Artificial Sequence
  Synthetic Sequence
acctctgacg

SEQ ID NO: 7678 - DNA, 10 bp, Artificial Sequence
  Synthetic Sequence
ctagaccttg

SEQ ID NO: 7679 - DNA, 10 bp, Artificial Sequence
  Synthetic Sequence
aacccgtcgt

SEQ ID NO: 7680 - DNA, 10 bp, Artificial Sequence
  Synthetic Sequence
gaactcaacc

SEQ ID NO: 7681 - DNA, 10 bp, Artificial Sequence
  Synthetic Sequence
tgtcggagta

SEQ ID NO: 7682 - DNA, 10 bp, Artificial Sequence
  Synthetic Sequence
gcggatccaa

SEQ ID NO: 7683 - DNA, 10 bp, Artificial Sequence
  Synthetic Sequence
cgcctccttc

SEQ ID NO: 7684 - DNA, 10 bp, Artificial Sequence
  Synthetic Sequence
tgtacaaagg

SEQ ID NO: 7685 - DNA, 10 bp, Artificial Sequence
  Synthetic Sequence
gtgactaccc

SEQ ID NO: 7686 - DNA, 10 bp, Artificial Sequence
  Synthetic Sequence
gaatacaccg

SEQ ID NO: 7687 - DNA, 10 bp, Artificial Sequence
  Synthetic Sequence
acaagtagca

SEQ ID NO: 7688 - DNA, 10 bp, Artificial Sequence
  Synthetic Sequence
cacagttgac

SEQ ID NO: 7689 - DNA, 10 bp, Artificial Sequence
  Synthetic Sequence
acgcccgaat

SEQ ID NO: 7690 - DNA, 10 bp, Artificial Sequence
  Synthetic Sequence
gacgtaggcg

SEQ ID NO: 7691 - DNA, 10 bp, Artificial Sequence
  Synthetic Sequence
gcctttgaag

SEQ ID NO: 7692 - DNA, 10 bp, Artificial Sequence
  Synthetic Sequence
ggtaacctac

SEQ ID NO: 7693 - DNA, 10 bp, Artificial Sequence
  Synthetic Sequence
cgcaaactgt

SEQ ID NO: 7694 - DNA, 10 bp, Artificial Sequence
  Synthetic Sequence
tgatgccgcg

SEQ ID NO: 7695 - DNA, 10 bp, Artificial Sequence
  Synthetic Sequence
tcgactaacg

SEQ ID NO: 7696 - DNA, 10 bp, Artificial Sequence
  Synthetic Sequence
cgataacttg

SEQ ID NO: 7697 - DNA, 10 bp, Artificial Sequence
  Synthetic Sequence
ccggagcgaa

SEQ ID NO: 7698 - DNA, 10 bp, Artificial Sequence
  Synthetic Sequence
tgtcagatat

SEQ ID NO: 7699 - DNA, 10 bp, Artificial Sequence
  Synthetic Sequence
ttggactata

SEQ ID NO: 7700 - DNA, 10 bp, Artificial Sequence
  Synthetic Sequence
cgctcgtagt

SEQ ID NO: 7701 - DNA, 10 bp, Artificial Sequence
  Synthetic Sequence
ttgcggcaac

SEQ ID NO: 7702 - DNA, 10 bp, Artificial Sequence
  Synthetic Sequence
gtctgcttca

SEQ ID NO: 7703 - DNA, 10 bp, Artificial Sequence
  Synthetic Sequence
tgcgcctaag

SEQ ID NO: 7704 - DNA, 10 bp, Artificial Sequence
  Synthetic Sequence
tagcaaggtc

SEQ ID NO: 7705 - DNA, 10 bp, Artificial Sequence
  Synthetic Sequence
agcattcatg

SEQ ID NO: 7706 - DNA, 10 bp, Artificial Sequence
  Synthetic Sequence
ttggtttggt

SEQ ID NO: 7707 - DNA, 10 bp, Artificial Sequence
  Synthetic Sequence
ttcccggctc

SEQ ID NO: 7708 - DNA, 10 bp, Artificial Sequence
  Synthetic Sequence
cagaaatatg

SEQ ID NO: 7709 - DNA, 10 bp, Artificial Sequence
  Synthetic Sequence
ttacacgctt

SEQ ID NO: 7710 - DNA, 10 bp, Artificial Sequence
  Synthetic Sequence
ggcatctata

SEQ ID NO: 7711 - DNA, 10 bp, Artificial Sequence
  Synthetic Sequence
tgatactaag

SEQ ID NO: 7712 - DNA, 10 bp, Artificial Sequence
  Synthetic Sequence
atcggatcgt

SEQ ID NO: 7713 - DNA, 10 bp, Artificial Sequence
  Synthetic Sequence
ccgtagcagc

SEQ ID NO: 7714 - DNA, 10 bp, Artificial Sequence
  Synthetic Sequence
aaacatccgg

SEQ ID NO: 7715 - DNA, 10 bp, Artificial Sequence
  Synthetic Sequence
gattgaagta

SEQ ID NO: 7716 - DNA, 10 bp, Artificial Sequence
  Synthetic Sequence
atgggatgac

SEQ ID NO: 7717 - DNA, 10 bp, Artificial Sequence
  Synthetic Sequence
ctgtaggccg

SEQ ID NO: 7718 - DNA, 10 bp, Artificial Sequence
  Synthetic Sequence
acgacacgtt

SEQ ID NO: 7719 - DNA, 10 bp, Artificial Sequence
  Synthetic Sequence
ccaagtacat

SEQ ID NO: 7720 - DNA, 10 bp, Artificial Sequence
  Synthetic Sequence
cgcatagtaa

SEQ ID NO: 7721 - DNA, 10 bp, Artificial Sequence
  Synthetic Sequence
acgaaatagt

SEQ ID NO: 7722 - DNA, 10 bp, Artificial Sequence
  Synthetic Sequence
gcaacctagg

SEQ ID NO: 7723 - DNA, 10 bp, Artificial Sequence
  Synthetic Sequence
gacctttatt

SEQ ID NO: 7724 - DNA, 10 bp, Artificial Sequence
  Synthetic Sequence
gagcggcata

SEQ ID NO: 7725 - DNA, 10 bp, Artificial Sequence
  Synthetic Sequence
ggatttagag

SEQ ID NO: 7726 - DNA, 10 bp, Artificial Sequence
  Synthetic Sequence
tttccggaac

SEQ ID NO: 7727 - DNA, 10 bp, Artificial Sequence
  Synthetic Sequence
gtcataatcc

SEQ ID NO: 7728 - DNA, 10 bp, Artificial Sequence
  Synthetic Sequence
ggtgcagtat

SEQ ID NO: 7729 - DNA, 10 bp, Artificial Sequence
  Synthetic Sequence
ttggctcagt

SEQ ID NO: 7730 - DNA, 10 bp, Artificial Sequence
  Synthetic Sequence
atatatcgta

SEQ ID NO: 7731 - DNA, 10 bp, Artificial Sequence
  Synthetic Sequence
gaagccctcg

SEQ ID NO: 7732 - DNA, 10 bp, Artificial Sequence
  Synthetic Sequence
cacagggacc

SEQ ID NO: 7733 - DNA, 10 bp, Artificial Sequence
  Synthetic Sequence
aagttatctt

SEQ ID NO: 7734 - DNA, 10 bp, Artificial Sequence
  Synthetic Sequence
ctccacactg

SEQ ID NO: 7735 - DNA, 10 bp, Artificial Sequence
  Synthetic Sequence
cgggcgagaa

SEQ ID NO: 7736 - DNA, 10 bp, Artificial Sequence
  Synthetic Sequence
gcaaatgagt

SEQ ID NO: 7737 - DNA, 10 bp, Artificial Sequence
  Synthetic Sequence
cgcatgcaca

SEQ ID NO: 7738 - DNA, 10 bp, Artificial Sequence
  Synthetic Sequence
tatacggcta

SEQ ID NO: 7739 - DNA, 10 bp, Artificial Sequence
  Synthetic Sequence
aatgaacatc

SEQ ID NO: 7740 - DNA, 10 bp, Artificial Sequence
  Synthetic Sequence
gtgattgtcc

SEQ ID NO: 7741 - DNA, 10 bp, Artificial Sequence
  Synthetic Sequence
cctcctccga

SEQ ID NO: 7742 - DNA, 10 bp, Artificial Sequence
  Synthetic Sequence
gtgtggtttc

SEQ ID NO: 7743 - DNA, 10 bp, Artificial Sequence
  Synthetic Sequence
acatcattcg

SEQ ID NO: 7744 - DNA, 10 bp, Artificial Sequence
  Synthetic Sequence
tttgcccagg

SEQ ID NO: 7745 - DNA, 10 bp, Artificial Sequence
  Synthetic Sequence
aagtaatacc

SEQ ID NO: 7746 - DNA, 10 bp, Artificial Sequence
  Synthetic Sequence
gggcaggtca

SEQ ID NO: 7747 - DNA, 10 bp, Artificial Sequence
  Synthetic Sequence
ttctaccacg

SEQ ID NO: 7748 - DNA, 10 bp, Artificial Sequence
  Synthetic Sequence
cgcatatttg

SEQ ID NO: 7749 - DNA, 10 bp, Artificial Sequence
  Synthetic Sequence
agaagggagt

SEQ ID NO: 7750 - DNA, 10 bp, Artificial Sequence
  Synthetic Sequence
aatcctcagt

SEQ ID NO: 7751 - DNA, 10 bp, Artificial Sequence
  Synthetic Sequence
gccctttcat

SEQ ID NO: 7752 - DNA, 10 bp, Artificial Sequence
  Synthetic Sequence
aaccaatgcg

SEQ ID NO: 7753 - DNA, 10 bp, Artificial Sequence
  Synthetic Sequence
acgcgtacgc

SEQ ID NO: 7754 - DNA, 10 bp, Artificial Sequence
  Synthetic Sequence
cctgttgctt

SEQ ID NO: 7755 - DNA, 10 bp, Artificial Sequence
  Synthetic Sequence
ttggctacat

SEQ ID NO: 7756 - DNA, 10 bp, Artificial Sequence
  Synthetic Sequence
ttaagatcac

SEQ ID NO: 7757 - DNA, 10 bp, Artificial Sequence
  Synthetic Sequence
cagagccagt

SEQ ID NO: 7758 - DNA, 10 bp, Artificial Sequence
  Synthetic Sequence
tgctcccaat

SEQ ID NO: 7759 - DNA, 10 bp, Artificial Sequence
  Synthetic Sequence
tcacgataac

SEQ ID NO: 7760 - DNA, 10 bp, Artificial Sequence
  Synthetic Sequence
gggaactaag

SEQ ID NO: 7761 - DNA, 10 bp, Artificial Sequence
  Synthetic Sequence
cattgggagg

SEQ ID NO: 7762 - DNA, 10 bp, Artificial Sequence
  Synthetic Sequence
tcactaggaa

SEQ ID NO: 7763 - DNA, 10 bp, Artificial Sequence
  Synthetic Sequence
agcctgggta

SEQ ID NO: 7764 - DNA, 10 bp, Artificial Sequence
  Synthetic Sequence
tgtgccgtgc

SEQ ID NO: 7765 - DNA, 10 bp, Artificial Sequence
  Synthetic Sequence
cttatctaat

SEQ ID NO: 7766 - DNA, 10 bp, Artificial Sequence
  Synthetic Sequence
ctcggaccaa

SEQ ID NO: 7767 - DNA, 10 bp, Artificial Sequence
  Synthetic Sequence
ttggcatatt

SEQ ID NO: 7768 - DNA, 10 bp, Artificial Sequence
  Synthetic Sequence
gcgaagagca

SEQ ID NO: 7769 - DNA, 10 bp, Artificial Sequence
  Synthetic Sequence
tcaagactgc

SEQ ID NO: 7770 - DNA, 10 bp, Artificial Sequence
  Synthetic Sequence
aaacgccctt

SEQ ID NO: 7771 - DNA, 10 bp, Artificial Sequence
  Synthetic Sequence
ctcgaataac

SEQ ID NO: 7772 - DNA, 10 bp, Artificial Sequence
  Synthetic Sequence
cgagttctcc

SEQ ID NO: 7773 - DNA, 10 bp, Artificial Sequence
  Synthetic Sequence
gtgcgtcatg

SEQ ID NO: 7774 - DNA, 10 bp, Artificial Sequence
  Synthetic Sequence
ttgttcgata

SEQ ID NO: 7775 - DNA, 10 bp, Artificial Sequence
  Synthetic Sequence
tcccgactgt

SEQ ID NO: 7776 - DNA, 10 bp, Artificial Sequence
  Synthetic Sequence
taccatgaca

SEQ ID NO: 7777 - DNA, 10 bp, Artificial Sequence
  Synthetic Sequence
ttgtcagcgc

SEQ ID NO: 7778 - DNA, 10 bp, Artificial Sequence
  Synthetic Sequence
aatgtccact

SEQ ID NO: 7779 - DNA, 10 bp, Artificial Sequence
  Synthetic Sequence
cagattgctc

SEQ ID NO: 7780 - DNA, 10 bp, Artificial Sequence
  Synthetic Sequence
cttatatggt

SEQ ID NO: 7781 - DNA, 10 bp, Artificial Sequence
  Synthetic Sequence
catggtggct

SEQ ID NO: 7782 - DNA, 10 bp, Artificial Sequence
  Synthetic Sequence
cggtctaatg

SEQ ID NO: 7783 - DNA, 10 bp, Artificial Sequence
  Synthetic Sequence
tcgatcactt

SEQ ID NO: 7784 - DNA, 10 bp, Artificial Sequence
  Synthetic Sequence
cacatattac

SEQ ID NO: 7785 - DNA, 10 bp, Artificial Sequence
  Synthetic Sequence
ccagccgtag

SEQ ID NO: 7786 - DNA, 10 bp, Artificial Sequence
  Synthetic Sequence
gtcgacgcag

SEQ ID NO: 7787 - DNA, 10 bp, Artificial Sequence
  Synthetic Sequence
tgtgaacacc

SEQ ID NO: 7788 - DNA, 10 bp, Artificial Sequence
  Synthetic Sequence
agtgggcaca

SEQ ID NO: 7789 - DNA, 10 bp, Artificial Sequence
  Synthetic Sequence
ttattccaaa

SEQ ID NO: 7790 - DNA, 10 bp, Artificial Sequence
  Synthetic Sequence
tccctacggg

SEQ ID NO: 7791 - DNA, 10 bp, Artificial Sequence
  Synthetic Sequence
gtgcgtgcac

SEQ ID NO: 7792 - DNA, 10 bp, Artificial Sequence
  Synthetic Sequence
acggcccttg

SEQ ID NO: 7793 - DNA, 10 bp, Artificial Sequence
  Synthetic Sequence
cttaagatct

SEQ ID NO: 7794 - DNA, 10 bp, Artificial Sequence
  Synthetic Sequence
gcgggttgta

SEQ ID NO: 7795 - DNA, 10 bp, Artificial Sequence
  Synthetic Sequence
ataataatac

SEQ ID NO: 7796 - DNA, 10 bp, Artificial Sequence
  Synthetic Sequence
ggacagaaac

SEQ ID NO: 7797 - DNA, 10 bp, Artificial Sequence
  Synthetic Sequence
aattaagctc

SEQ ID NO: 7798 - DNA, 10 bp, Artificial Sequence
  Synthetic Sequence
agaccaacat

SEQ ID NO: 7799 - DNA, 10 bp, Artificial Sequence
  Synthetic Sequence
attccgcacg

SEQ ID NO: 7800 - DNA, 10 bp, Artificial Sequence
  Synthetic Sequence
tggtgctggc

SEQ ID NO: 7801 - DNA, 10 bp, Artificial Sequence
  Synthetic Sequence
aagggttcta

SEQ ID NO: 7802 - DNA, 10 bp, Artificial Sequence
  Synthetic Sequence
ctcaggacaa

SEQ ID NO: 7803 - DNA, 10 bp, Artificial Sequence
  Synthetic Sequence
gagtttggcg

SEQ ID NO: 7804 - DNA, 10 bp, Artificial Sequence
  Synthetic Sequence
aggtggacgg

SEQ ID NO: 7805 - DNA, 10 bp, Artificial Sequence
  Synthetic Sequence
ttcgataaga

SEQ ID NO: 7806 - DNA, 10 bp, Artificial Sequence
  Synthetic Sequence
gatacttcgc

SEQ ID NO: 7807 - DNA, 10 bp, Artificial Sequence
  Synthetic Sequence
gtccgcacct

SEQ ID NO: 7808 - DNA, 10 bp, Artificial Sequence
  Synthetic Sequence
gcatttcagc

SEQ ID NO: 7809 - DNA, 10 bp, Artificial Sequence
  Synthetic Sequence
gctatgttgt

SEQ ID NO: 7810 - DNA, 10 bp, Artificial Sequence
  Synthetic Sequence
ttattgcgcc

SEQ ID NO: 7811 - DNA, 10 bp, Artificial Sequence
  Synthetic Sequence
taatacattt

SEQ ID NO: 7812 - DNA, 10 bp, Artificial Sequence
  Synthetic Sequence
agacctcgct

SEQ ID NO: 7813 - DNA, 10 bp, Artificial Sequence
  Synthetic Sequence
tacttcctaa

SEQ ID NO: 7814 - DNA, 10 bp, Artificial Sequence
  Synthetic Sequence
gtgtgcctcg

SEQ ID NO: 7815 - DNA, 10 bp, Artificial Sequence
  Synthetic Sequence
cccaacggac

SEQ ID NO: 7816 - DNA, 10 bp, Artificial Sequence
  Synthetic Sequence
accaccgctg

SEQ ID NO: 7817 - DNA, 10 bp, Artificial Sequence
  Synthetic Sequence
cctaaactta

SEQ ID NO: 7818 - DNA, 10 bp, Artificial Sequence
  Synthetic Sequence
gtagcggaca

SEQ ID NO: 7819 - DNA, 10 bp, Artificial Sequence
  Synthetic Sequence
accgttatgg

SEQ ID NO: 7820 - DNA, 10 bp, Artificial Sequence
  Synthetic Sequence
actttgtact

SEQ ID NO: 7821 - DNA, 10 bp, Artificial Sequence
  Synthetic Sequence
tgggaaggta

SEQ ID NO: 7822 - DNA, 10 bp, Artificial Sequence
  Synthetic Sequence
tgatcacatt

SEQ ID NO: 7823 - DNA, 10 bp, Artificial Sequence
  Synthetic Sequence
cctcactatt

SEQ ID NO: 7824 - DNA, 10 bp, Artificial Sequence
  Synthetic Sequence
tgcagtttaa

SEQ ID NO: 7825 - DNA, 10 bp, Artificial Sequence
  Synthetic Sequence
gtggtcagat

SEQ ID NO: 7826 - DNA, 10 bp, Artificial Sequence
  Synthetic Sequence
gagtgcagcg

SEQ ID NO: 7827 - DNA, 10 bp, Artificial Sequence
  Synthetic Sequence
cctagtaacg

SEQ ID NO: 7828 - DNA, 10 bp, Artificial Sequence
  Synthetic Sequence
atacggagga

SEQ ID NO: 7829 - DNA, 10 bp, Artificial Sequence
  Synthetic Sequence
gctggcgtga

SEQ ID NO: 7830 - DNA, 10 bp, Artificial Sequence
  Synthetic Sequence
tttgcacggt

SEQ ID NO: 7831 - DNA, 10 bp, Artificial Sequence
  Synthetic Sequence
gtctcacgcg

SEQ ID NO: 7832 - DNA, 10 bp, Artificial Sequence
  Synthetic Sequence
acggcattct

SEQ ID NO: 7833 - DNA, 10 bp, Artificial Sequence
  Synthetic Sequence
cacgctaggg

SEQ ID NO: 7834 - DNA, 10 bp, Artificial Sequence
  Synthetic Sequence
ggattgtttg

SEQ ID NO: 7835 - DNA, 10 bp, Artificial Sequence
  Synthetic Sequence
tctaggtccg

SEQ ID NO: 7836 - DNA, 10 bp, Artificial Sequence
  Synthetic Sequence
ttgcgttctt

SEQ ID NO: 7837 - DNA, 10 bp, Artificial Sequence
  Synthetic Sequence
gacgtctaga

SEQ ID NO: 7838 - DNA, 10 bp, Artificial Sequence
  Synthetic Sequence
ggtatgttta

SEQ ID NO: 7839 - DNA, 10 bp, Artificial Sequence
  Synthetic Sequence
aacgtttaac

SEQ ID NO: 7840 - DNA, 10 bp, Artificial Sequence
  Synthetic Sequence
taccacccta

SEQ ID NO: 7841 - DNA, 10 bp, Artificial Sequence
  Synthetic Sequence
cagtaaactt

SEQ ID NO: 7842 - DNA, 10 bp, Artificial Sequence
  Synthetic Sequence
tagccatcga

SEQ ID NO: 7843 - DNA, 10 bp, Artificial Sequence
  Synthetic Sequence
aacctgtaaa

SEQ ID NO: 7844 - DNA, 10 bp, Artificial Sequence
  Synthetic Sequence
gcgccctttg

SEQ ID NO: 7845 - DNA, 10 bp, Artificial Sequence
  Synthetic Sequence
gctttgttag

SEQ ID NO: 7846 - DNA, 10 bp, Artificial Sequence
  Synthetic Sequence
tgttggccgc

SEQ ID NO: 7847 - DNA, 10 bp, Artificial Sequence
  Synthetic Sequence
tttgtggtgg

SEQ ID NO: 7848 - DNA, 10 bp, Artificial Sequence
  Synthetic Sequence
agtcctcgga

SEQ ID NO: 7849 - DNA, 10 bp, Artificial Sequence
  Synthetic Sequence
taaactacgg

SEQ ID NO: 7850 - DNA, 10 bp, Artificial Sequence
  Synthetic Sequence
catggatcaa

SEQ ID NO: 7851 - DNA, 10 bp, Artificial Sequence
  Synthetic Sequence
tgtagattta

SEQ ID NO: 7852 - DNA, 10 bp, Artificial Sequence
  Synthetic Sequence
gaatattagc

SEQ ID NO: 7853 - DNA, 10 bp, Artificial Sequence
  Synthetic Sequence
tctacctccc

SEQ ID NO: 7854 - DNA, 10 bp, Artificial Sequence
  Synthetic Sequence
tatctcgttc

SEQ ID NO: 7855 - DNA, 10 bp, Artificial Sequence
  Synthetic Sequence
accgtaattc

SEQ ID NO: 7856 - DNA, 10 bp, Artificial Sequence
  Synthetic Sequence
gccgtggtac

SEQ ID NO: 7857 - DNA, 10 bp, Artificial Sequence
  Synthetic Sequence
ctacatatag

SEQ ID NO: 7858 - DNA, 10 bp, Artificial Sequence
  Synthetic Sequence
gggagtaagg

SEQ ID NO: 7859 - DNA, 10 bp, Artificial Sequence
  Synthetic Sequence
cacgagctga

SEQ ID NO: 7860 - DNA, 10 bp, Artificial Sequence
  Synthetic Sequence
tagtgtgggc

SEQ ID NO: 7861 - DNA, 10 bp, Artificial Sequence
  Synthetic Sequence
ttccgggacc

SEQ ID NO: 7862 - DNA, 10 bp, Artificial Sequence
  Synthetic Sequence
caatgaacct

SEQ ID NO: 7863 - DNA, 10 bp, Artificial Sequence
  Synthetic Sequence
ttgagcaatt

SEQ ID NO: 7864 - DNA, 10 bp, Artificial Sequence
  Synthetic Sequence
cgagtcgaac

SEQ ID NO: 7865 - DNA, 10 bp, Artificial Sequence
  Synthetic Sequence
gttgcgatgt

SEQ ID NO: 7866 - DNA, 10 bp, Artificial Sequence
  Synthetic Sequence
catgtattga

SEQ ID NO: 7867 - DNA, 10 bp, Artificial Sequence
  Synthetic Sequence
gctatacgac

SEQ ID NO: 7868 - DNA, 10 bp, Artificial Sequence
  Synthetic Sequence
ctacccagac

SEQ ID NO: 7869 - DNA, 10 bp, Artificial Sequence
  Synthetic Sequence
ttggtactcg

SEQ ID NO: 7870 - DNA, 10 bp, Artificial Sequence
  Synthetic Sequence
atgtcgggct

SEQ ID NO: 7871 - DNA, 10 bp, Artificial Sequence
  Synthetic Sequence
ggtttcgcac

SEQ ID NO: 7872 - DNA, 10 bp, Artificial Sequence
  Synthetic Sequence
cgtggccgaa

SEQ ID NO: 7873 - DNA, 10 bp, Artificial Sequence
  Synthetic Sequence
aaccgccgga

SEQ ID NO: 7874 - DNA, 10 bp, Artificial Sequence
  Synthetic Sequence
gacgtacgta

SEQ ID NO: 7875 - DNA, 10 bp, Artificial Sequence
  Synthetic Sequence
tataaatgcc

SEQ ID NO: 7876 - DNA, 10 bp, Artificial Sequence
  Synthetic Sequence
acgtaggcca

SEQ ID NO: 7877 - DNA, 10 bp, Artificial Sequence
  Synthetic Sequence
gcggtaattt

SEQ ID NO: 7878 - DNA, 10 bp, Artificial Sequence
  Synthetic Sequence
tttccagagg

SEQ ID NO: 7879 - DNA, 10 bp, Artificial Sequence
  Synthetic Sequence
acacgggtgg

SEQ ID NO: 7880 - DNA, 10 bp, Artificial Sequence
  Synthetic Sequence
caccagctcc

SEQ ID NO: 7881 - DNA, 10 bp, Artificial Sequence
  Synthetic Sequence
cgcacgaggt

SEQ ID NO: 7882 - DNA, 10 bp, Artificial Sequence
  Synthetic Sequence
agtctgacac

SEQ ID NO: 7883 - DNA, 10 bp, Artificial Sequence
  Synthetic Sequence
ttcctcgtgc

SEQ ID NO: 7884 - DNA, 10 bp, Artificial Sequence
  Synthetic Sequence
ggtaacgtcg

SEQ ID NO: 7885 - DNA, 10 bp, Artificial Sequence
  Synthetic Sequence
gacttaagtt

SEQ ID NO: 7886 - DNA, 10 bp, Artificial Sequence
  Synthetic Sequence
cataaatgaa

SEQ ID NO: 7887 - DNA, 10 bp, Artificial Sequence
  Synthetic Sequence
cttaacagtt

SEQ ID NO: 7888 - DNA, 10 bp, Artificial Sequence
  Synthetic Sequence
accttccaaa

SEQ ID NO: 7889 - DNA, 10 bp, Artificial Sequence
  Synthetic Sequence
ctacaaccgc

SEQ ID NO: 7890 - DNA, 10 bp, Artificial Sequence
  Synthetic Sequence
ccggtctcaa

SEQ ID NO: 7891 - DNA, 10 bp, Artificial Sequence
  Synthetic Sequence
tcacacgatc

SEQ ID NO: 7892 - DNA, 10 bp, Artificial Sequence
  Synthetic Sequence
actgtggccc

SEQ ID NO: 7893 - DNA, 10 bp, Artificial Sequence
  Synthetic Sequence
atcatgaagg

SEQ ID NO: 7894 - DNA, 10 bp, Artificial Sequence
  Synthetic Sequence
caaatacgtg

SEQ ID NO: 7895 - DNA, 10 bp, Artificial Sequence
  Synthetic Sequence
gcagtatcgc

SEQ ID NO: 7896 - DNA, 10 bp, Artificial Sequence
  Synthetic Sequence
ctagagcgag

SEQ ID NO: 7897 - DNA, 10 bp, Artificial Sequence
  Synthetic Sequence
ctggcattgc

SEQ ID NO: 7898 - DNA, 10 bp, Artificial Sequence
  Synthetic Sequence
agggaaagac

SEQ ID NO: 7899 - DNA, 10 bp, Artificial Sequence
  Synthetic Sequence
agcagacgcg

SEQ ID NO: 7900 - DNA, 10 bp, Artificial Sequence
  Synthetic Sequence
gactttaccc

SEQ ID NO: 7901 - DNA, 10 bp, Artificial Sequence
  Synthetic Sequence
tttgttagcg

SEQ ID NO: 7902 - DNA, 10 bp, Artificial Sequence
  Synthetic Sequence
aaacctgact

SEQ ID NO: 7903 - DNA, 10 bp, Artificial Sequence
  Synthetic Sequence
ctcataactt

SEQ ID NO: 7904 - DNA, 10 bp, Artificial Sequence
  Synthetic Sequence
aaggtaacaa

SEQ ID NO: 7905 - DNA, 10 bp, Artificial Sequence
  Synthetic Sequence
ctacgaccag

SEQ ID NO: 7906 - DNA, 10 bp, Artificial Sequence
  Synthetic Sequence
taagtgaacc

SEQ ID NO: 7907 - DNA, 10 bp, Artificial Sequence
  Synthetic Sequence
ccagtcgggt

SEQ ID NO: 7908 - DNA, 10 bp, Artificial Sequence
  Synthetic Sequence
tgttattggc

SEQ ID NO: 7909 - DNA, 10 bp, Artificial Sequence
  Synthetic Sequence
tgttcatgct

SEQ ID NO: 7910 - DNA, 10 bp, Artificial Sequence
  Synthetic Sequence
attctttagc

SEQ ID NO: 7911 - DNA, 10 bp, Artificial Sequence
  Synthetic Sequence
accttgcttc

SEQ ID NO: 7912 - DNA, 10 bp, Artificial Sequence
  Synthetic Sequence
aataatcctg

SEQ ID NO: 7913 - DNA, 10 bp, Artificial Sequence
  Synthetic Sequence
gcagcaaccg

SEQ ID NO: 7914 - DNA, 10 bp, Artificial Sequence
  Synthetic Sequence
attcttgacg

SEQ ID NO: 7915 - DNA, 10 bp, Artificial Sequence
  Synthetic Sequence
agggtaccat

SEQ ID NO: 7916 - DNA, 10 bp, Artificial Sequence
  Synthetic Sequence
gactgacagg

SEQ ID NO: 7917 - DNA, 10 bp, Artificial Sequence
  Synthetic Sequence
actacctaac

SEQ ID NO: 7918 - DNA, 10 bp, Artificial Sequence
  Synthetic Sequence
gctagtgctt

SEQ ID NO: 7919 - DNA, 10 bp, Artificial Sequence
  Synthetic Sequence
tcatgaagtc

SEQ ID NO: 7920 - DNA, 10 bp, Artificial Sequence
  Synthetic Sequence
acgggaaacc

SEQ ID NO: 7921 - DNA, 10 bp, Artificial Sequence
  Synthetic Sequence
acaacgacat

SEQ ID NO: 7922 - DNA, 10 bp, Artificial Sequence
  Synthetic Sequence
agaagctgct

SEQ ID NO: 7923 - DNA, 10 bp, Artificial Sequence
  Synthetic Sequence
ctccttacgg

SEQ ID NO: 7924 - DNA, 10 bp, Artificial Sequence
  Synthetic Sequence
acccggtgtg

SEQ ID NO: 7925 - DNA, 10 bp, Artificial Sequence
  Synthetic Sequence
gtcgccacga

SEQ ID NO: 7926 - DNA, 10 bp, Artificial Sequence
  Synthetic Sequence
atgtctctcc

SEQ ID NO: 7927 - DNA, 10 bp, Artificial Sequence
  Synthetic Sequence
cttgggcagg

SEQ ID NO: 7928 - DNA, 10 bp, Artificial Sequence
  Synthetic Sequence
attcggattt

SEQ ID NO: 7929 - DNA, 10 bp, Artificial Sequence
  Synthetic Sequence
gctcgtaaga

SEQ ID NO: 7930 - DNA, 10 bp, Artificial Sequence
  Synthetic Sequence
ctaagtgggc

SEQ ID NO: 7931 - DNA, 10 bp, Artificial Sequence
  Synthetic Sequence
taaaccaatt

SEQ ID NO: 7932 - DNA, 10 bp, Artificial Sequence
  Synthetic Sequence
acatataagg

SEQ ID NO: 7933 - DNA, 10 bp, Artificial Sequence
  Synthetic Sequence
acataatgtg

SEQ ID NO: 7934 - DNA, 10 bp, Artificial Sequence
  Synthetic Sequence
gggttgtctt

SEQ ID NO: 7935 - DNA, 10 bp, Artificial Sequence
  Synthetic Sequence
agcgcagcgt

SEQ ID NO: 7936 - DNA, 10 bp, Artificial Sequence
  Synthetic Sequence
ctataacggg

SEQ ID NO: 7937 - DNA, 10 bp, Artificial Sequence
  Synthetic Sequence
gggaagaata

SEQ ID NO: 7938 - DNA, 10 bp, Artificial Sequence
  Synthetic Sequence
tttacatgtc

SEQ ID NO: 7939 - DNA, 10 bp, Artificial Sequence
  Synthetic Sequence
aagtagggat

SEQ ID NO: 7940 - DNA, 10 bp, Artificial Sequence
  Synthetic Sequence
gaaatactcc

SEQ ID NO: 7941 - DNA, 10 bp, Artificial Sequence
  Synthetic Sequence
cgtacagcat

SEQ ID NO: 7942 - DNA, 10 bp, Artificial Sequence
  Synthetic Sequence
ttaccatcct

SEQ ID NO: 7943 - DNA, 10 bp, Artificial Sequence
  Synthetic Sequence
aataggtacc

SEQ ID NO: 7944 - DNA, 10 bp, Artificial Sequence
  Synthetic Sequence
gcgtatttcc

SEQ ID NO: 7945 - DNA, 10 bp, Artificial Sequence
  Synthetic Sequence
cgagattata

SEQ ID NO: 7946 - DNA, 10 bp, Artificial Sequence
  Synthetic Sequence
tcggatgcta

SEQ ID NO: 7947 - DNA, 10 bp, Artificial Sequence
  Synthetic Sequence
ccttgtcacc

SEQ ID NO: 7948 - DNA, 10 bp, Artificial Sequence
  Synthetic Sequence
gaggaaagcg

SEQ ID NO: 7949 - DNA, 10 bp, Artificial Sequence
  Synthetic Sequence
acgctgtagc

SEQ ID NO: 7950 - DNA, 10 bp, Artificial Sequence
  Synthetic Sequence
tgtggtcact

SEQ ID NO: 7951 - DNA, 10 bp, Artificial Sequence
  Synthetic Sequence
gcagtccttg

SEQ ID NO: 7952 - DNA, 10 bp, Artificial Sequence
  Synthetic Sequence
gcctaaatca

SEQ ID NO: 7953 - DNA, 10 bp, Artificial Sequence
  Synthetic Sequence
gtcatacgaa

SEQ ID NO: 7954 - DNA, 10 bp, Artificial Sequence
  Synthetic Sequence
cgtcctccac

SEQ ID NO: 7955 - DNA, 10 bp, Artificial Sequence
  Synthetic Sequence
gatccaatcg

SEQ ID NO: 7956 - DNA, 10 bp, Artificial Sequence
  Synthetic Sequence
gggacagctt

SEQ ID NO: 7957 - DNA, 10 bp, Artificial Sequence
  Synthetic Sequence
aagatcgcgg

SEQ ID NO: 7958 - DNA, 10 bp, Artificial Sequence
  Synthetic Sequence
gcctggcaga

SEQ ID NO: 7959 - DNA, 10 bp, Artificial Sequence
  Synthetic Sequence
cggaatggaa

SEQ ID NO: 7960 - DNA, 10 bp, Artificial Sequence
  Synthetic Sequence
tgactacgga

SEQ ID NO: 7961 - DNA, 10 bp, Artificial Sequence
  Synthetic Sequence
gttccatgcg

SEQ ID NO: 7962 - DNA, 10 bp, Artificial Sequence
  Synthetic Sequence
gtgggtaaac

SEQ ID NO: 7963 - DNA, 10 bp, Artificial Sequence
  Synthetic Sequence
gcagattcat

SEQ ID NO: 7964 - DNA, 10 bp, Artificial Sequence
  Synthetic Sequence
tagctcggaa

SEQ ID NO: 7965 - DNA, 10 bp, Artificial Sequence
  Synthetic Sequence
aaagtctggc

SEQ ID NO: 7966 - DNA, 10 bp, Artificial Sequence
  Synthetic Sequence
ataaactttc

SEQ ID NO: 7967 - DNA, 10 bp, Artificial Sequence
  Synthetic Sequence
aacgaaggca

SEQ ID NO: 7968 - DNA, 10 bp, Artificial Sequence
  Synthetic Sequence
atggctacca

SEQ ID NO: 7969 - DNA, 10 bp, Artificial Sequence
  Synthetic Sequence
accaacacag

SEQ ID NO: 7970 - DNA, 10 bp, Artificial Sequence
  Synthetic Sequence
ctctgccata

SEQ ID NO: 7971 - DNA, 10 bp, Artificial Sequence
  Synthetic Sequence
tccgagaccg

SEQ ID NO: 7972 - DNA, 10 bp, Artificial Sequence
  Synthetic Sequence
gaattcgtga

SEQ ID NO: 7973 - DNA, 10 bp, Artificial Sequence
  Synthetic Sequence
ttaaagatgc

SEQ ID NO: 7974 - DNA, 10 bp, Artificial Sequence
  Synthetic Sequence
attagaggat

SEQ ID NO: 7975 - DNA, 10 bp, Artificial Sequence
  Synthetic Sequence
cacaaatggt

SEQ ID NO: 7976 - DNA, 10 bp, Artificial Sequence
  Synthetic Sequence
tattcgtaat

SEQ ID NO: 7977 - DNA, 10 bp, Artificial Sequence
  Synthetic Sequence
tccgttagaa

SEQ ID NO: 7978 - DNA, 10 bp, Artificial Sequence
  Synthetic Sequence
gagttgataa

SEQ ID NO: 7979 - DNA, 10 bp, Artificial Sequence
  Synthetic Sequence
cagcgattta

SEQ ID NO: 7980 - DNA, 10 bp, Artificial Sequence
  Synthetic Sequence
cgtcaacgca

SEQ ID NO: 7981 - DNA, 10 bp, Artificial Sequence
  Synthetic Sequence
tgtagtactc

SEQ ID NO: 7982 - DNA, 10 bp, Artificial Sequence
  Synthetic Sequence
ttgataccag

SEQ ID NO: 7983 - DNA, 10 bp, Artificial Sequence
  Synthetic Sequence
ccacactcta

SEQ ID NO: 7984 - DNA, 10 bp, Artificial Sequence
  Synthetic Sequence
agtgataaac

SEQ ID NO: 7985 - DNA, 10 bp, Artificial Sequence
  Synthetic Sequence
ccacaccaaa

SEQ ID NO: 7986 - DNA, 10 bp, Artificial Sequence
  Synthetic Sequence
actgataatt

SEQ ID NO: 7987 - DNA, 10 bp, Artificial Sequence
  Synthetic Sequence
aagtcgcgta

SEQ ID NO: 7988 - DNA, 10 bp, Artificial Sequence
  Synthetic Sequence
cagatcggcc

SEQ ID NO: 7989 - DNA, 10 bp, Artificial Sequence
  Synthetic Sequence
aatttaatgc

SEQ ID NO: 7990 - DNA, 10 bp, Artificial Sequence
  Synthetic Sequence
tagggaactt

SEQ ID NO: 7991 - DNA, 10 bp, Artificial Sequence
  Synthetic Sequence
gcgagaactg

SEQ ID NO: 7992 - DNA, 10 bp, Artificial Sequence
  Synthetic Sequence
ctgagccttg

SEQ ID NO: 7993 - DNA, 10 bp, Artificial Sequence
  Synthetic Sequence
gggatagaag

SEQ ID NO: 7994 - DNA, 10 bp, Artificial Sequence
  Synthetic Sequence
ctgacagcaa

SEQ ID NO: 7995 - DNA, 10 bp, Artificial Sequence
  Synthetic Sequence
atcatagtat

SEQ ID NO: 7996 - DNA, 10 bp, Artificial Sequence
  Synthetic Sequence
gtcgttcctt

SEQ ID NO: 7997 - DNA, 10 bp, Artificial Sequence
  Synthetic Sequence
gacactctat

SEQ ID NO: 7998 - DNA, 10 bp, Artificial Sequence
  Synthetic Sequence
cgaaaggtgg

SEQ ID NO: 7999 - DNA, 10 bp, Artificial Sequence
  Synthetic Sequence
gtgtgtggtc

SEQ ID NO: 8000 - DNA, 10 bp, Artificial Sequence
  Synthetic Sequence
aatctagtta

SEQ ID NO: 8001 - DNA, 10 bp, Artificial Sequence
  Synthetic Sequence
tgccgtggtt

SEQ ID NO: 8002 - DNA, 10 bp, Artificial Sequence
  Synthetic Sequence
ttgtgggacg

SEQ ID NO: 8003 - DNA, 10 bp, Artificial Sequence
  Synthetic Sequence
tggttagttt

SEQ ID NO: 8004 - DNA, 10 bp, Artificial Sequence
  Synthetic Sequence
gtggctagtg

SEQ ID NO: 8005 - DNA, 10 bp, Artificial Sequence
  Synthetic Sequence
cgtattagta

SEQ ID NO: 8006 - DNA, 10 bp, Artificial Sequence
  Synthetic Sequence
ggtgtttctt

SEQ ID NO: 8007 - DNA, 10 bp, Artificial Sequence
  Synthetic Sequence
ctcaactttg

SEQ ID NO: 8008 - DNA, 10 bp, Artificial Sequence
  Synthetic Sequence
aacgtcgaaa

SEQ ID NO: 8009 - DNA, 10 bp, Artificial Sequence
  Synthetic Sequence
tactggcact

SEQ ID NO: 8010 - DNA, 10 bp, Artificial Sequence
  Synthetic Sequence
cgtaggcgtg

SEQ ID NO: 8011 - DNA, 10 bp, Artificial Sequence
  Synthetic Sequence
ggcagacgta

SEQ ID NO: 8012 - DNA, 10 bp, Artificial Sequence
  Synthetic Sequence
acctagtcta

SEQ ID NO: 8013 - DNA, 10 bp, Artificial Sequence
  Synthetic Sequence
ggtgcagacc

SEQ ID NO: 8014 - DNA, 10 bp, Artificial Sequence
  Synthetic Sequence
tggacacacg

SEQ ID NO: 8015 - DNA, 10 bp, Artificial Sequence
  Synthetic Sequence
taagatatag

SEQ ID NO: 8016 - DNA, 10 bp, Artificial Sequence
  Synthetic Sequence
tgcgaataga

SEQ ID NO: 8017 - DNA, 10 bp, Artificial Sequence
  Synthetic Sequence
caggattgtt

SEQ ID NO: 8018 - DNA, 10 bp, Artificial Sequence
  Synthetic Sequence
cacatgccgc

SEQ ID NO: 8019 - DNA, 10 bp, Artificial Sequence
  Synthetic Sequence
ttggacgctc

SEQ ID NO: 8020 - DNA, 10 bp, Artificial Sequence
  Synthetic Sequence
acgggtaggg

SEQ ID NO: 8021 - DNA, 10 bp, Artificial Sequence
  Synthetic Sequence
atttctgagc

SEQ ID NO: 8022 - DNA, 10 bp, Artificial Sequence
  Synthetic Sequence
acacctaaca

SEQ ID NO: 8023 - DNA, 10 bp, Artificial Sequence
  Synthetic Sequence
tacgcgcgca

SEQ ID NO: 8024 - DNA, 10 bp, Artificial Sequence
  Synthetic Sequence
actcctttca

SEQ ID NO: 8025 - DNA, 10 bp, Artificial Sequence
  Synthetic Sequence
ctgtagttcc

SEQ ID NO: 8026 - DNA, 10 bp, Artificial Sequence
  Synthetic Sequence
gcgcgtaacc

SEQ ID NO: 8027 - DNA, 10 bp, Artificial Sequence
  Synthetic Sequence
gtgtgtcgga

SEQ ID NO: 8028 - DNA, 10 bp, Artificial Sequence
  Synthetic Sequence
ttctgcgtcc

SEQ ID NO: 8029 - DNA, 10 bp, Artificial Sequence
  Synthetic Sequence
agaggtctcg

SEQ ID NO: 8030 - DNA, 10 bp, Artificial Sequence
  Synthetic Sequence
cccacctcac

SEQ ID NO: 8031 - DNA, 10 bp, Artificial Sequence
  Synthetic Sequence
aactcatgtc

SEQ ID NO: 8032 - DNA, 10 bp, Artificial Sequence
  Synthetic Sequence
atctatccaa

SEQ ID NO: 8033 - DNA, 10 bp, Artificial Sequence
  Synthetic Sequence
agtcttgcag

SEQ ID NO: 8034 - DNA, 10 bp, Artificial Sequence
  Synthetic Sequence
tcgtaagaaa

SEQ ID NO: 8035 - DNA, 10 bp, Artificial Sequence
  Synthetic Sequence
cccagaagca

SEQ ID NO: 8036 - DNA, 10 bp, Artificial Sequence
  Synthetic Sequence
aattggccta

SEQ ID NO: 8037 - DNA, 10 bp, Artificial Sequence
  Synthetic Sequence
cgcccaagtc

SEQ ID NO: 8038 - DNA, 10 bp, Artificial Sequence
  Synthetic Sequence
caaccctggg

SEQ ID NO: 8039 - DNA, 10 bp, Artificial Sequence
  Synthetic Sequence
tggcctaagg

SEQ ID NO: 8040 - DNA, 10 bp, Artificial Sequence
  Synthetic Sequence
catcgaaagg

SEQ ID NO: 8041 - DNA, 10 bp, Artificial Sequence
  Synthetic Sequence
tgataacgca

SEQ ID NO: 8042 - DNA, 10 bp, Artificial Sequence
  Synthetic Sequence
gaaagacact

SEQ ID NO: 8043 - DNA, 10 bp, Artificial Sequence
  Synthetic Sequence
gcggaaagtc

SEQ ID NO: 8044 - DNA, 10 bp, Artificial Sequence
  Synthetic Sequence
ctcgtaagct

SEQ ID NO: 8045 - DNA, 10 bp, Artificial Sequence
  Synthetic Sequence
tgagtgcatt

SEQ ID NO: 8046 - DNA, 10 bp, Artificial Sequence
  Synthetic Sequence
gaaatgaaga

SEQ ID NO: 8047 - DNA, 10 bp, Artificial Sequence
  Synthetic Sequence
atatccggac

SEQ ID NO: 8048 - DNA, 10 bp, Artificial Sequence
  Synthetic Sequence
agatgcaacc

SEQ ID NO: 8049 - DNA, 10 bp, Artificial Sequence
  Synthetic Sequence
attataaacg

SEQ ID NO: 8050 - DNA, 10 bp, Artificial Sequence
  Synthetic Sequence
cttgggactc

SEQ ID NO: 8051 - DNA, 10 bp, Artificial Sequence
  Synthetic Sequence
ccactgacat

SEQ ID NO: 8052 - DNA, 10 bp, Artificial Sequence
  Synthetic Sequence
gatattggtt

SEQ ID NO: 8053 - DNA, 10 bp, Artificial Sequence
  Synthetic Sequence
agacggtcga

SEQ ID NO: 8054 - DNA, 10 bp, Artificial Sequence
  Synthetic Sequence
aacatgatgt

SEQ ID NO: 8055 - DNA, 10 bp, Artificial Sequence
  Synthetic Sequence
aagtcgctgg

SEQ ID NO: 8056 - DNA, 10 bp, Artificial Sequence
  Synthetic Sequence
tcttgtctga

SEQ ID NO: 8057 - DNA, 10 bp, Artificial Sequence
  Synthetic Sequence
tttggatacc

SEQ ID NO: 8058 - DNA, 10 bp, Artificial Sequence
  Synthetic Sequence
ggctaccatg

SEQ ID NO: 8059 - DNA, 10 bp, Artificial Sequence
  Synthetic Sequence
ctgcaatgag

SEQ ID NO: 8060 - DNA, 10 bp, Artificial Sequence
  Synthetic Sequence
gattacaaag

SEQ ID NO: 8061 - DNA, 10 bp, Artificial Sequence
  Synthetic Sequence
taccgtaata

SEQ ID NO: 8062 - DNA, 10 bp, Artificial Sequence
  Synthetic Sequence
aatactacga

SEQ ID NO: 8063 - DNA, 10 bp, Artificial Sequence
  Synthetic Sequence
tacgattcct

SEQ ID NO: 8064 - DNA, 10 bp, Artificial Sequence
  Synthetic Sequence
agacgctgtc

SEQ ID NO: 8065 - DNA, 10 bp, Artificial Sequence
  Synthetic Sequence
tgagctccga

SEQ ID NO: 8066 - DNA, 10 bp, Artificial Sequence
  Synthetic Sequence
ctattcataa

SEQ ID NO: 8067 - DNA, 10 bp, Artificial Sequence
  Synthetic Sequence
tcagaaagct

SEQ ID NO: 8068 - DNA, 10 bp, Artificial Sequence
  Synthetic Sequence
aacaatgcga

SEQ ID NO: 8069 - DNA, 10 bp, Artificial Sequence
  Synthetic Sequence
cacactcagt

SEQ ID NO: 8070 - DNA, 10 bp, Artificial Sequence
  Synthetic Sequence
aacgtatgtg

SEQ ID NO: 8071 - DNA, 10 bp, Artificial Sequence
  Synthetic Sequence
catcatctct

SEQ ID NO: 8072 - DNA, 10 bp, Artificial Sequence
  Synthetic Sequence
gtcacgccac

SEQ ID NO: 8073 - DNA, 10 bp, Artificial Sequence
  Synthetic Sequence
tatcaaacgc

SEQ ID NO: 8074 - DNA, 10 bp, Artificial Sequence
  Synthetic Sequence
agctgtgcgc

SEQ ID NO: 8075 - DNA, 10 bp, Artificial Sequence
  Synthetic Sequence
atcggtgatg

SEQ ID NO: 8076 - DNA, 10 bp, Artificial Sequence
  Synthetic Sequence
gtcattgatc

SEQ ID NO: 8077 - DNA, 10 bp, Artificial Sequence
  Synthetic Sequence
caactacagt

SEQ ID NO: 8078 - DNA, 10 bp, Artificial Sequence
  Synthetic Sequence
ggctgtctgt

SEQ ID NO: 8079 - DNA, 10 bp, Artificial Sequence
  Synthetic Sequence
ccacgaagta

SEQ ID NO: 8080 - DNA, 10 bp, Artificial Sequence
  Synthetic Sequence
agtacgtttc

SEQ ID NO: 8081 - DNA, 10 bp, Artificial Sequence
  Synthetic Sequence
ccaggcacaa

SEQ ID NO: 8082 - DNA, 10 bp, Artificial Sequence
  Synthetic Sequence
cgcggtcgat

SEQ ID NO: 8083 - DNA, 10 bp, Artificial Sequence
  Synthetic Sequence
cgccaaagcg

SEQ ID NO: 8084 - DNA, 10 bp, Artificial Sequence
  Synthetic Sequence
gacagtactc

SEQ ID NO: 8085 - DNA, 10 bp, Artificial Sequence
  Synthetic Sequence
ctgctcaact

SEQ ID NO: 8086 - DNA, 10 bp, Artificial Sequence
  Synthetic Sequence
gggagttggt

SEQ ID NO: 8087 - DNA, 10 bp, Artificial Sequence
  Synthetic Sequence
agactttcgt

SEQ ID NO: 8088 - DNA, 10 bp, Artificial Sequence
  Synthetic Sequence
aactagtgtg

SEQ ID NO: 8089 - DNA, 10 bp, Artificial Sequence
  Synthetic Sequence
gcgacacgag

SEQ ID NO: 8090 - DNA, 10 bp, Artificial Sequence
  Synthetic Sequence
gtggtgtccg

SEQ ID NO: 8091 - DNA, 10 bp, Artificial Sequence
  Synthetic Sequence
tacttaggat

SEQ ID NO: 8092 - DNA, 10 bp, Artificial Sequence
  Synthetic Sequence
caacttaata

SEQ ID NO: 8093 - DNA, 10 bp, Artificial Sequence
  Synthetic Sequence
tatcagtagc

SEQ ID NO: 8094 - DNA, 10 bp, Artificial Sequence
  Synthetic Sequence
gatgccgagt

SEQ ID NO: 8095 - DNA, 10 bp, Artificial Sequence
  Synthetic Sequence
catattcttt

SEQ ID NO: 8096 - DNA, 10 bp, Artificial Sequence
  Synthetic Sequence
tcttgcgagc

SEQ ID NO: 8097 - DNA, 10 bp, Artificial Sequence
  Synthetic Sequence
gcgacattat

SEQ ID NO: 8098 - DNA, 10 bp, Artificial Sequence
  Synthetic Sequence
cacccattgc

SEQ ID NO: 8099 - DNA, 10 bp, Artificial Sequence
  Synthetic Sequence
gaggcattca

SEQ ID NO: 8100 - DNA, 10 bp, Artificial Sequence
  Synthetic Sequence
ctaccgcgtg

SEQ ID NO: 8101 - DNA, 10 bp, Artificial Sequence
  Synthetic Sequence
aacacccgac

SEQ ID NO: 8102 - DNA, 10 bp, Artificial Sequence
  Synthetic Sequence
tcatttaacc

SEQ ID NO: 8103 - DNA, 10 bp, Artificial Sequence
  Synthetic Sequence
tgtcccgata

SEQ ID NO: 8104 - DNA, 10 bp, Artificial Sequence
  Synthetic Sequence
gtagttgggt

SEQ ID NO: 8105 - DNA, 10 bp, Artificial Sequence
  Synthetic Sequence
acaagccaac

SEQ ID NO: 8106 - DNA, 10 bp, Artificial Sequence
  Synthetic Sequence
aatccatatg

SEQ ID NO: 8107 - DNA, 10 bp, Artificial Sequence
  Synthetic Sequence
ctcctttgta

SEQ ID NO: 8108 - DNA, 10 bp, Artificial Sequence
  Synthetic Sequence
cgtgccctac

SEQ ID NO: 8109 - DNA, 10 bp, Artificial Sequence
  Synthetic Sequence
agctattgac

SEQ ID NO: 8110 - DNA, 10 bp, Artificial Sequence
  Synthetic Sequence
cacgagaagt

SEQ ID NO: 8111 - DNA, 10 bp, Artificial Sequence
  Synthetic Sequence
atgacgcgtg

SEQ ID NO: 8112 - DNA, 10 bp, Artificial Sequence
  Synthetic Sequence
ctggcgatta

SEQ ID NO: 8113 - DNA, 10 bp, Artificial Sequence
  Synthetic Sequence
ggtacattac

SEQ ID NO: 8114 - DNA, 10 bp, Artificial Sequence
  Synthetic Sequence
cttaactata

SEQ ID NO: 8115 - DNA, 10 bp, Artificial Sequence
  Synthetic Sequence
attagacttg

SEQ ID NO: 8116 - DNA, 10 bp, Artificial Sequence
  Synthetic Sequence
ggcctatatg

SEQ ID NO: 8117 - DNA, 10 bp, Artificial Sequence
  Synthetic Sequence
attaccaaca

SEQ ID NO: 8118 - DNA, 10 bp, Artificial Sequence
  Synthetic Sequence
ccgaagggtc

SEQ ID NO: 8119 - DNA, 10 bp, Artificial Sequence
  Synthetic Sequence
aatgcaggaa

SEQ ID NO: 8120 - DNA, 10 bp, Artificial Sequence
  Synthetic Sequence
atacgcgtga

SEQ ID NO: 8121 - DNA, 10 bp, Artificial Sequence
  Synthetic Sequence
ccgataaatt

SEQ ID NO: 8122 - DNA, 10 bp, Artificial Sequence
  Synthetic Sequence
catatgaacg

SEQ ID NO: 8123 - DNA, 10 bp, Artificial Sequence
  Synthetic Sequence
cggtccacta

SEQ ID NO: 8124 - DNA, 10 bp, Artificial Sequence
  Synthetic Sequence
tgagacagat

SEQ ID NO: 8125 - DNA, 10 bp, Artificial Sequence
  Synthetic Sequence
gggtctgatt

SEQ ID NO: 8126 - DNA, 10 bp, Artificial Sequence
  Synthetic Sequence
tagtaaatgc

SEQ ID NO: 8127 - DNA, 10 bp, Artificial Sequence
  Synthetic Sequence
actcccgtcc

SEQ ID NO: 8128 - DNA, 10 bp, Artificial Sequence
  Synthetic Sequence
ttgataagcg

SEQ ID NO: 8129 - DNA, 10 bp, Artificial Sequence
  Synthetic Sequence
gcgcttgtaa

SEQ ID NO: 8130 - DNA, 10 bp, Artificial Sequence
  Synthetic Sequence
cgacggctag

SEQ ID NO: 8131 - DNA, 10 bp, Artificial Sequence
  Synthetic Sequence
gaagcgccaa

SEQ ID NO: 8132 - DNA, 10 bp, Artificial Sequence
  Synthetic Sequence
gtgcattcat

SEQ ID NO: 8133 - DNA, 10 bp, Artificial Sequence
  Synthetic Sequence
tttagtaact

SEQ ID NO: 8134 - DNA, 10 bp, Artificial Sequence
  Synthetic Sequence
cgaggcgttc

SEQ ID NO: 8135 - DNA, 10 bp, Artificial Sequence
  Synthetic Sequence
atcacattaa

SEQ ID NO: 8136 - DNA, 10 bp, Artificial Sequence
  Synthetic Sequence
tttgtttcgc

SEQ ID NO: 8137 - DNA, 10 bp, Artificial Sequence
  Synthetic Sequence
cctagaacgg

SEQ ID NO: 8138 - DNA, 10 bp, Artificial Sequence
  Synthetic Sequence
cctgacatag

SEQ ID NO: 8139 - DNA, 10 bp, Artificial Sequence
  Synthetic Sequence
tccctctgta

SEQ ID NO: 8140 - DNA, 10 bp, Artificial Sequence
  Synthetic Sequence
tagtgaggtg

SEQ ID NO: 8141 - DNA, 10 bp, Artificial Sequence
  Synthetic Sequence
gaacgcagta

SEQ ID NO: 8142 - DNA, 10 bp, Artificial Sequence
  Synthetic Sequence
gaccctccta

SEQ ID NO: 8143 - DNA, 10 bp, Artificial Sequence
  Synthetic Sequence
tgcagcttgt

SEQ ID NO: 8144 - DNA, 10 bp, Artificial Sequence
  Synthetic Sequence
tggaattggg

SEQ ID NO: 8145 - DNA, 10 bp, Artificial Sequence
  Synthetic Sequence
tcgcacgtat

SEQ ID NO: 8146 - DNA, 10 bp, Artificial Sequence
  Synthetic Sequence
tttctacgta

SEQ ID NO: 8147 - DNA, 10 bp, Artificial Sequence
  Synthetic Sequence
taaccagata

SEQ ID NO: 8148 - DNA, 10 bp, Artificial Sequence
  Synthetic Sequence
ttgcacgttg

SEQ ID NO: 8149 - DNA, 10 bp, Artificial Sequence
  Synthetic Sequence
ttctcccttc

SEQ ID NO: 8150 - DNA, 10 bp, Artificial Sequence
  Synthetic Sequence
ccacggtgca

SEQ ID NO: 8151 - DNA, 10 bp, Artificial Sequence
  Synthetic Sequence
ctacaagagg

SEQ ID NO: 8152 - DNA, 10 bp, Artificial Sequence
  Synthetic Sequence
caaaggttga

SEQ ID NO: 8153 - DNA, 10 bp, Artificial Sequence
  Synthetic Sequence
actgagcttt

SEQ ID NO: 8154 - DNA, 10 bp, Artificial Sequence
  Synthetic Sequence
atcaggtagc

SEQ ID NO: 8155 - DNA, 10 bp, Artificial Sequence
  Synthetic Sequence
ctcctctcat

SEQ ID NO: 8156 - DNA, 10 bp, Artificial Sequence
  Synthetic Sequence
ctgagtttgc

SEQ ID NO: 8157 - DNA, 10 bp, Artificial Sequence
  Synthetic Sequence
atgtaaagta

SEQ ID NO: 8158 - DNA, 10 bp, Artificial Sequence
  Synthetic Sequence
ccagcggaac

SEQ ID NO: 8159 - DNA, 10 bp, Artificial Sequence
  Synthetic Sequence
tacagtcaac

SEQ ID NO: 8160 - DNA, 10 bp, Artificial Sequence
  Synthetic Sequence
ctgatcgggt

SEQ ID NO: 8161 - DNA, 10 bp, Artificial Sequence
  Synthetic Sequence
acccgccatg

SEQ ID NO: 8162 - DNA, 10 bp, Artificial Sequence
  Synthetic Sequence
caagctgtta

SEQ ID NO: 8163 - DNA, 10 bp, Artificial Sequence
  Synthetic Sequence
gtttatgatg

SEQ ID NO: 8164 - DNA, 10 bp, Artificial Sequence
  Synthetic Sequence
tcatctattt

SEQ ID NO: 8165 - DNA, 10 bp, Artificial Sequence
  Synthetic Sequence
aaatgcatcg

SEQ ID NO: 8166 - DNA, 10 bp, Artificial Sequence
  Synthetic Sequence
aatcgagtct

SEQ ID NO: 8167 - DNA, 10 bp, Artificial Sequence
  Synthetic Sequence
aatccgctac

SEQ ID NO: 8168 - DNA, 10 bp, Artificial Sequence
  Synthetic Sequence
cgtaccgttc

SEQ ID NO: 8169 - DNA, 10 bp, Artificial Sequence
  Synthetic Sequence
cgcaagttag

SEQ ID NO: 8170 - DNA, 10 bp, Artificial Sequence
  Synthetic Sequence
cgcagcactg

SEQ ID NO: 8171 - DNA, 10 bp, Artificial Sequence
  Synthetic Sequence
cagagagctt

SEQ ID NO: 8172 - DNA, 10 bp, Artificial Sequence
  Synthetic Sequence
agattgagca

SEQ ID NO: 8173 - DNA, 10 bp, Artificial Sequence
  Synthetic Sequence
gagcatttaa

SEQ ID NO: 8174 - DNA, 10 bp, Artificial Sequence
  Synthetic Sequence
aagccctgag

SEQ ID NO: 8175 - DNA, 10 bp, Artificial Sequence
  Synthetic Sequence
atctactcct

SEQ ID NO: 8176 - DNA, 10 bp, Artificial Sequence
  Synthetic Sequence
gaaagagaag

SEQ ID NO: 8177 - DNA, 10 bp, Artificial Sequence
  Synthetic Sequence
ccaccttggc

SEQ ID NO: 8178 - DNA, 10 bp, Artificial Sequence
  Synthetic Sequence
acgcatcatt

SEQ ID NO: 8179 - DNA, 10 bp, Artificial Sequence
  Synthetic Sequence
gtcggataca

SEQ ID NO: 8180 - DNA, 10 bp, Artificial Sequence
  Synthetic Sequence
atacatttgc

SEQ ID NO: 8181 - DNA, 10 bp, Artificial Sequence
  Synthetic Sequence
ttaccgctaa

SEQ ID NO: 8182 - DNA, 10 bp, Artificial Sequence
  Synthetic Sequence
cgtaccacac

SEQ ID NO: 8183 - DNA, 10 bp, Artificial Sequence
  Synthetic Sequence
agattatgcc

SEQ ID NO: 8184 - DNA, 10 bp, Artificial Sequence
  Synthetic Sequence
ggttgaggct

SEQ ID NO: 8185 - DNA, 10 bp, Artificial Sequence
  Synthetic Sequence
tacttcgctt

SEQ ID NO: 8186 - DNA, 10 bp, Artificial Sequence
  Synthetic Sequence
tcgttctatt

SEQ ID NO: 8187 - DNA, 10 bp, Artificial Sequence
  Synthetic Sequence
ggtcctatac

SEQ ID NO: 8188 - DNA, 10 bp, Artificial Sequence
  Synthetic Sequence
tcatacatgc

SEQ ID NO: 8189 - DNA, 10 bp, Artificial Sequence
  Synthetic Sequence
acgttcgccc

SEQ ID NO: 8190 - DNA, 10 bp, Artificial Sequence
  Synthetic Sequence
aaccgtgcgt

SEQ ID NO: 8191 - DNA, 10 bp, Artificial Sequence
  Synthetic Sequence
gagctgattt

SEQ ID NO: 8192 - DNA, 10 bp, Artificial Sequence
  Synthetic Sequence
taatgtgatt

SEQ ID NO: 8193 - DNA, 10 bp, Artificial Sequence
  Synthetic Sequence
gcacttaagg

SEQ ID NO: 8194 - DNA, 10 bp, Artificial Sequence
  Synthetic Sequence
cagccgtgtc

SEQ ID NO: 8195 - DNA, 10 bp, Artificial Sequence
  Synthetic Sequence
cgacaccgag

SEQ ID NO: 8196 - DNA, 10 bp, Artificial Sequence
  Synthetic Sequence
aaagtagaac

SEQ ID NO: 8197 - DNA, 10 bp, Artificial Sequence
  Synthetic Sequence
tcttctcggg

SEQ ID NO: 8198 - DNA, 10 bp, Artificial Sequence
  Synthetic Sequence
cttgtcccgt

SEQ ID NO: 8199 - DNA, 10 bp, Artificial Sequence
  Synthetic Sequence
tggacgtggc

SEQ ID NO: 8200 - DNA, 10 bp, Artificial Sequence
  Synthetic Sequence
cggaatattt

SEQ ID NO: 8201 - DNA, 10 bp, Artificial Sequence
  Synthetic Sequence
gcgctcagca

SEQ ID NO: 8202 - DNA, 10 bp, Artificial Sequence
  Synthetic Sequence
gtgtttgcgt

SEQ ID NO: 8203 - DNA, 10 bp, Artificial Sequence
  Synthetic Sequence
gattcctcgt

SEQ ID NO: 8204 - DNA, 10 bp, Artificial Sequence
  Synthetic Sequence
cgttggagac

SEQ ID NO: 8205 - DNA, 10 bp, Artificial Sequence
  Synthetic Sequence
cgaaacgcca

SEQ ID NO: 8206 - DNA, 10 bp, Artificial Sequence
  Synthetic Sequence
tcgagccagg

SEQ ID NO: 8207 - DNA, 10 bp, Artificial Sequence
  Synthetic Sequence
ggtgtcgtta

SEQ ID NO: 8208 - DNA, 10 bp, Artificial Sequence
  Synthetic Sequence
acaaactggg

SEQ ID NO: 8209 - DNA, 10 bp, Artificial Sequence
  Synthetic Sequence
aagctgcgac

SEQ ID NO: 8210 - DNA, 10 bp, Artificial Sequence
  Synthetic Sequence
tatcttgtgt

SEQ ID NO: 8211 - DNA, 10 bp, Artificial Sequence
  Synthetic Sequence
caacctcctt

SEQ ID NO: 8212 - DNA, 10 bp, Artificial Sequence
  Synthetic Sequence
ttagatctgg

SEQ ID NO: 8213 - DNA, 10 bp, Artificial Sequence
  Synthetic Sequence
caatcatcca

SEQ ID NO: 8214 - DNA, 10 bp, Artificial Sequence
  Synthetic Sequence
caccagggag

SEQ ID NO: 8215 - DNA, 10 bp, Artificial Sequence
  Synthetic Sequence
tgggcttaaa

SEQ ID NO: 8216 - DNA, 10 bp, Artificial Sequence
  Synthetic Sequence
tgcagtaagt

SEQ ID NO: 8217 - DNA, 10 bp, Artificial Sequence
  Synthetic Sequence
acgcccacag

SEQ ID NO: 8218 - DNA, 10 bp, Artificial Sequence
  Synthetic Sequence
gcggtaacca

SEQ ID NO: 8219 - DNA, 10 bp, Artificial Sequence
  Synthetic Sequence
agtggtatag

SEQ ID NO: 8220 - DNA, 10 bp, Artificial Sequence
  Synthetic Sequence
atctcaccta

SEQ ID NO: 8221 - DNA, 10 bp, Artificial Sequence
  Synthetic Sequence
tgcattacat

SEQ ID NO: 8222 - DNA, 10 bp, Artificial Sequence
  Synthetic Sequence
tattggatca

SEQ ID NO: 8223 - DNA, 10 bp, Artificial Sequence
  Synthetic Sequence
acgagcgatt

SEQ ID NO: 8224 - DNA, 10 bp, Artificial Sequence
  Synthetic Sequence
ggcaccatag

SEQ ID NO: 8225 - DNA, 10 bp, Artificial Sequence
  Synthetic Sequence
aagcagtacg

SEQ ID NO: 8226 - DNA, 10 bp, Artificial Sequence
  Synthetic Sequence
ggagtcgtgc

SEQ ID NO: 8227 - DNA, 10 bp, Artificial Sequence
  Synthetic Sequence
agaccttgag

SEQ ID NO: 8228 - DNA, 10 bp, Artificial Sequence
  Synthetic Sequence
tggataaatc

SEQ ID NO: 8229 - DNA, 10 bp, Artificial Sequence
  Synthetic Sequence
aacgggctac

SEQ ID NO: 8230 - DNA, 10 bp, Artificial Sequence
  Synthetic Sequence
acgtactaga

SEQ ID NO: 8231 - DNA, 10 bp, Artificial Sequence
  Synthetic Sequence
tcccttctca

SEQ ID NO: 8232 - DNA, 10 bp, Artificial Sequence
  Synthetic Sequence
aattgggtcg

SEQ ID NO: 8233 - DNA, 10 bp, Artificial Sequence
  Synthetic Sequence
tggcgactta

SEQ ID NO: 8234 - DNA, 10 bp, Artificial Sequence
  Synthetic Sequence
aacttggcga

SEQ ID NO: 8235 - DNA, 10 bp, Artificial Sequence
  Synthetic Sequence
actgtagaaa

SEQ ID NO: 8236 - DNA, 10 bp, Artificial Sequence
  Synthetic Sequence
tgtcctttga

SEQ ID NO: 8237 - DNA, 10 bp, Artificial Sequence
  Synthetic Sequence
tatcattact

SEQ ID NO: 8238 - DNA, 10 bp, Artificial Sequence
  Synthetic Sequence
ccataggact

SEQ ID NO: 8239 - DNA, 10 bp, Artificial Sequence
  Synthetic Sequence
tctaatatcg

SEQ ID NO: 8240 - DNA, 10 bp, Artificial Sequence
  Synthetic Sequence
ctattgcttt

SEQ ID NO: 8241 - DNA, 10 bp, Artificial Sequence
  Synthetic Sequence
tcgacgtttc

SEQ ID NO: 8242 - DNA, 10 bp, Artificial Sequence
  Synthetic Sequence
gccctcttct

SEQ ID NO: 8243 - DNA, 10 bp, Artificial Sequence
  Synthetic Sequence
cgtgcacgat

SEQ ID NO: 8244 - DNA, 10 bp, Artificial Sequence
  Synthetic Sequence
gcctcacctt

SEQ ID NO: 8245 - DNA, 10 bp, Artificial Sequence
  Synthetic Sequence
cgccttcgct

SEQ ID NO: 8246 - DNA, 10 bp, Artificial Sequence
  Synthetic Sequence
gtagggctat

SEQ ID NO: 8247 - DNA, 10 bp, Artificial Sequence
  Synthetic Sequence
aaagcccaaa

SEQ ID NO: 8248 - DNA, 10 bp, Artificial Sequence
  Synthetic Sequence
ccgtgcagta

SEQ ID NO: 8249 - DNA, 10 bp, Artificial Sequence
  Synthetic Sequence
cccgtgggat

SEQ ID NO: 8250 - DNA, 10 bp, Artificial Sequence
  Synthetic Sequence
ggtctcgatc

SEQ ID NO: 8251 - DNA, 10 bp, Artificial Sequence
  Synthetic Sequence
aatagttcaa

SEQ ID NO: 8252 - DNA, 10 bp, Artificial Sequence
  Synthetic Sequence
tgatacctgt

SEQ ID NO: 8253 - DNA, 10 bp, Artificial Sequence
  Synthetic Sequence
tgggaacggt

SEQ ID NO: 8254 - DNA, 10 bp, Artificial Sequence
  Synthetic Sequence
ttggacaacc

SEQ ID NO: 8255 - DNA, 10 bp, Artificial Sequence
  Synthetic Sequence
cgtaggaatc

SEQ ID NO: 8256 - DNA, 10 bp, Artificial Sequence
  Synthetic Sequence
atttagtttc

SEQ ID NO: 8257 - DNA, 10 bp, Artificial Sequence
  Synthetic Sequence
caccgactac

SEQ ID NO: 8258 - DNA, 10 bp, Artificial Sequence
  Synthetic Sequence
ctctcggtct

SEQ ID NO: 8259 - DNA, 10 bp, Artificial Sequence
  Synthetic Sequence
cctcgatcat

SEQ ID NO: 8260 - DNA, 10 bp, Artificial Sequence
  Synthetic Sequence
agcagcagcc

SEQ ID NO: 8261 - DNA, 10 bp, Artificial Sequence
  Synthetic Sequence
tgcggtggag

SEQ ID NO: 8262 - DNA, 10 bp, Artificial Sequence
  Synthetic Sequence
ggacgaatag

SEQ ID NO: 8263 - DNA, 10 bp, Artificial Sequence
  Synthetic Sequence
catagctatc

SEQ ID NO: 8264 - DNA, 10 bp, Artificial Sequence
  Synthetic Sequence
cttgtagtat

SEQ ID NO: 8265 - DNA, 10 bp, Artificial Sequence
  Synthetic Sequence
gatctgaaac

SEQ ID NO: 8266 - DNA, 10 bp, Artificial Sequence
  Synthetic Sequence
aggaccttta

SEQ ID NO: 8267 - DNA, 10 bp, Artificial Sequence
  Synthetic Sequence
ttcatgggta

SEQ ID NO: 8268 - DNA, 10 bp, Artificial Sequence
  Synthetic Sequence
ctcggattat

SEQ ID NO: 8269 - DNA, 10 bp, Artificial Sequence
  Synthetic Sequence
gcgcacagtg

SEQ ID NO: 8270 - DNA, 10 bp, Artificial Sequence
  Synthetic Sequence
attgtactta

SEQ ID NO: 8271 - DNA, 10 bp, Artificial Sequence
  Synthetic Sequence
gctcgctgga

SEQ ID NO: 8272 - DNA, 10 bp, Artificial Sequence
  Synthetic Sequence
tgctgagcgt

SEQ ID NO: 8273 - DNA, 10 bp, Artificial Sequence
  Synthetic Sequence
tccaagagcc

SEQ ID NO: 8274 - DNA, 10 bp, Artificial Sequence
  Synthetic Sequence
ctggtaggga

SEQ ID NO: 8275 - DNA, 10 bp, Artificial Sequence
  Synthetic Sequence
cccgtgacca

SEQ ID NO: 8276 - DNA, 10 bp, Artificial Sequence
  Synthetic Sequence
tcgacggagt

SEQ ID NO: 8277 - DNA, 10 bp, Artificial Sequence
  Synthetic Sequence
cgatcgaccg

SEQ ID NO: 8278 - DNA, 10 bp, Artificial Sequence
  Synthetic Sequence
accgtcggtc

SEQ ID NO: 8279 - DNA, 10 bp, Artificial Sequence
  Synthetic Sequence
aagattcaga

SEQ ID NO: 8280 - DNA, 10 bp, Artificial Sequence
  Synthetic Sequence
ttccaccatt

SEQ ID NO: 8281 - DNA, 10 bp, Artificial Sequence
  Synthetic Sequence
gaggcgtctc

SEQ ID NO: 8282 - DNA, 10 bp, Artificial Sequence
  Synthetic Sequence
tactagtggc

SEQ ID NO: 8283 - DNA, 10 bp, Artificial Sequence
  Synthetic Sequence
ttggtgacaa

SEQ ID NO: 8284 - DNA, 10 bp, Artificial Sequence
  Synthetic Sequence
atggttgctc

SEQ ID NO: 8285 - DNA, 10 bp, Artificial Sequence
  Synthetic Sequence
gcagagaacc

SEQ ID NO: 8286 - DNA, 10 bp, Artificial Sequence
  Synthetic Sequence
gccaccactc

SEQ ID NO: 8287 - DNA, 10 bp, Artificial Sequence
  Synthetic Sequence
agcggtcatc

SEQ ID NO: 8288 - DNA, 10 bp, Artificial Sequence
  Synthetic Sequence
gaatatgctt

SEQ ID NO: 8289 - DNA, 10 bp, Artificial Sequence
  Synthetic Sequence
tgacagattg

SEQ ID NO: 8290 - DNA, 10 bp, Artificial Sequence
  Synthetic Sequence
tcgtggagcc

SEQ ID NO: 8291 - DNA, 10 bp, Artificial Sequence
  Synthetic Sequence
gatagtccgt

SEQ ID NO: 8292 - DNA, 10 bp, Artificial Sequence
  Synthetic Sequence
gatattagaa

SEQ ID NO: 8293 - DNA, 10 bp, Artificial Sequence
  Synthetic Sequence
agtaatgggc

SEQ ID NO: 8294 - DNA, 10 bp, Artificial Sequence
  Synthetic Sequence
agagaagtag

SEQ ID NO: 8295 - DNA, 10 bp, Artificial Sequence
  Synthetic Sequence
tccaccggtc

SEQ ID NO: 8296 - DNA, 10 bp, Artificial Sequence
  Synthetic Sequence
gtgaacccta

SEQ ID NO: 8297 - DNA, 10 bp, Artificial Sequence
  Synthetic Sequence
ctcgacgacg

SEQ ID NO: 8298 - DNA, 10 bp, Artificial Sequence
  Synthetic Sequence
tcaacggtga

SEQ ID NO: 8299 - DNA, 10 bp, Artificial Sequence
  Synthetic Sequence
gaatgctaga

SEQ ID NO: 8300 - DNA, 10 bp, Artificial Sequence
  Synthetic Sequence
tgtccataaa

SEQ ID NO: 8301 - DNA, 10 bp, Artificial Sequence
  Synthetic Sequence
ttctgtcaca

SEQ ID NO: 8302 - DNA, 10 bp, Artificial Sequence
  Synthetic Sequence
tcgagactaa

SEQ ID NO: 8303 - DNA, 10 bp, Artificial Sequence
  Synthetic Sequence
cggaatacgg

SEQ ID NO: 8304 - DNA, 10 bp, Artificial Sequence
  Synthetic Sequence
acatcagccc

SEQ ID NO: 8305 - DNA, 10 bp, Artificial Sequence
  Synthetic Sequence
agtagattgg

SEQ ID NO: 8306 - DNA, 10 bp, Artificial Sequence
  Synthetic Sequence
ccaccacatt

SEQ ID NO: 8307 - DNA, 10 bp, Artificial Sequence
  Synthetic Sequence
tagaagcgcg

SEQ ID NO: 8308 - DNA, 10 bp, Artificial Sequence
  Synthetic Sequence
agtgagatta

SEQ ID NO: 8309 - DNA, 10 bp, Artificial Sequence
  Synthetic Sequence
acgagtcacc

SEQ ID NO: 8310 - DNA, 10 bp, Artificial Sequence
  Synthetic Sequence
cggaccttac

SEQ ID NO: 8311 - DNA, 10 bp, Artificial Sequence
  Synthetic Sequence
acgattggtc

SEQ ID NO: 8312 - DNA, 10 bp, Artificial Sequence
  Synthetic Sequence
ccatctcctc

SEQ ID NO: 8313 - DNA, 10 bp, Artificial Sequence
  Synthetic Sequence
gcgtcgggta

SEQ ID NO: 8314 - DNA, 10 bp, Artificial Sequence
  Synthetic Sequence
gctaccgtac

SEQ ID NO: 8315 - DNA, 10 bp, Artificial Sequence
  Synthetic Sequence
tcacagaaca

SEQ ID NO: 8316 - DNA, 10 bp, Artificial Sequence
  Synthetic Sequence
gtgtaatgca

SEQ ID NO: 8317 - DNA, 10 bp, Artificial Sequence
  Synthetic Sequence
gcccgttaac

SEQ ID NO: 8318 - DNA, 10 bp, Artificial Sequence
  Synthetic Sequence
cagcgttggc

SEQ ID NO: 8319 - DNA, 10 bp, Artificial Sequence
  Synthetic Sequence
ccggaagagc

SEQ ID NO: 8320 - DNA, 10 bp, Artificial Sequence
  Synthetic Sequence
tttgcaccta

SEQ ID NO: 8321 - DNA, 10 bp, Artificial Sequence
  Synthetic Sequence
ggatgctgat

SEQ ID NO: 8322 - DNA, 10 bp, Artificial Sequence
  Synthetic Sequence
gtaagtgagg

SEQ ID NO: 8323 - DNA, 10 bp, Artificial Sequence
  Synthetic Sequence
cttaagtgtc

SEQ ID NO: 8324 - DNA, 10 bp, Artificial Sequence
  Synthetic Sequence
gtcaaagact

SEQ ID NO: 8325 - DNA, 10 bp, Artificial Sequence
  Synthetic Sequence
acggatggga

SEQ ID NO: 8326 - DNA, 10 bp, Artificial Sequence
  Synthetic Sequence
atttgaatct

SEQ ID NO: 8327 - DNA, 10 bp, Artificial Sequence
  Synthetic Sequence
gtaactatca

SEQ ID NO: 8328 - DNA, 10 bp, Artificial Sequence
  Synthetic Sequence
tactcggtgt

SEQ ID NO: 8329 - DNA, 10 bp, Artificial Sequence
  Synthetic Sequence
agagagttct

SEQ ID NO: 8330 - DNA, 10 bp, Artificial Sequence
  Synthetic Sequence
ggcataactg

SEQ ID NO: 8331 - DNA, 10 bp, Artificial Sequence
  Synthetic Sequence
gtcgggttgc

SEQ ID NO: 8332 - DNA, 10 bp, Artificial Sequence
  Synthetic Sequence
aggacgagcg

SEQ ID NO: 8333 - DNA, 10 bp, Artificial Sequence
  Synthetic Sequence
aagttggaac

SEQ ID NO: 8334 - DNA, 10 bp, Artificial Sequence
  Synthetic Sequence
tgttcctacg

SEQ ID NO: 8335 - DNA, 10 bp, Artificial Sequence
  Synthetic Sequence
aggagtgtga

SEQ ID NO: 8336 - DNA, 10 bp, Artificial Sequence
  Synthetic Sequence
acctttcctg

SEQ ID NO: 8337 - DNA, 10 bp, Artificial Sequence
  Synthetic Sequence
tgttcctcgc

SEQ ID NO: 8338 - DNA, 10 bp, Artificial Sequence
  Synthetic Sequence
gcagtcacta

SEQ ID NO: 8339 - DNA, 10 bp, Artificial Sequence
  Synthetic Sequence
ggtgcacgtg

SEQ ID NO: 8340 - DNA, 10 bp, Artificial Sequence
  Synthetic Sequence
cgttacccgc

SEQ ID NO: 8341 - DNA, 10 bp, Artificial Sequence
  Synthetic Sequence
actcgtttag

SEQ ID NO: 8342 - DNA, 10 bp, Artificial Sequence
  Synthetic Sequence
tttaaggatc

SEQ ID NO: 8343 - DNA, 10 bp, Artificial Sequence
  Synthetic Sequence
cgggcccaaa

SEQ ID NO: 8344 - DNA, 10 bp, Artificial Sequence
  Synthetic Sequence
tagagagcac

SEQ ID NO: 8345 - DNA, 10 bp, Artificial Sequence
  Synthetic Sequence
ttagtggtta

SEQ ID NO: 8346 - DNA, 10 bp, Artificial Sequence
  Synthetic Sequence
cagattacgt

SEQ ID NO: 8347 - DNA, 10 bp, Artificial Sequence
  Synthetic Sequence
ccttgactca

SEQ ID NO: 8348 - DNA, 10 bp, Artificial Sequence
  Synthetic Sequence
cgtataaatg

SEQ ID NO: 8349 - DNA, 10 bp, Artificial Sequence
  Synthetic Sequence
cccgatactc

SEQ ID NO: 8350 - DNA, 10 bp, Artificial Sequence
  Synthetic Sequence
accagcgtcg

SEQ ID NO: 8351 - DNA, 10 bp, Artificial Sequence
  Synthetic Sequence
agcccattgt

SEQ ID NO: 8352 - DNA, 10 bp, Artificial Sequence
  Synthetic Sequence
gcgaggtagg

SEQ ID NO: 8353 - DNA, 10 bp, Artificial Sequence
  Synthetic Sequence
ataagggccc

SEQ ID NO: 8354 - DNA, 10 bp, Artificial Sequence
  Synthetic Sequence
atgcctagga

SEQ ID NO: 8355 - DNA, 10 bp, Artificial Sequence
  Synthetic Sequence
acgaggttag

SEQ ID NO: 8356 - DNA, 10 bp, Artificial Sequence
  Synthetic Sequence
tgaataggtc

SEQ ID NO: 8357 - DNA, 10 bp, Artificial Sequence
  Synthetic Sequence
tcctgggtcg

SEQ ID NO: 8358 - DNA, 10 bp, Artificial Sequence
  Synthetic Sequence
gtgattgaga

SEQ ID NO: 8359 - DNA, 10 bp, Artificial Sequence
  Synthetic Sequence
agtatcagga

SEQ ID NO: 8360 - DNA, 10 bp, Artificial Sequence
  Synthetic Sequence
ccgctagcat

SEQ ID NO: 8361 - DNA, 10 bp, Artificial Sequence
  Synthetic Sequence
cgagggaatg

SEQ ID NO: 8362 - DNA, 10 bp, Artificial Sequence
  Synthetic Sequence
gtgttcacct

SEQ ID NO: 8363 - DNA, 10 bp, Artificial Sequence
  Synthetic Sequence
tcgaccggag

SEQ ID NO: 8364 - DNA, 10 bp, Artificial Sequence
  Synthetic Sequence
gttgtaactc

SEQ ID NO: 8365 - DNA, 10 bp, Artificial Sequence
  Synthetic Sequence
cccagtgtct

SEQ ID NO: 8366 - DNA, 10 bp, Artificial Sequence
  Synthetic Sequence
agcccacatt

SEQ ID NO: 8367 - DNA, 10 bp, Artificial Sequence
  Synthetic Sequence
tgtgttcgag

SEQ ID NO: 8368 - DNA, 10 bp, Artificial Sequence
  Synthetic Sequence
cgttatcaac

SEQ ID NO: 8369 - DNA, 10 bp, Artificial Sequence
  Synthetic Sequence
taacgcctga

SEQ ID NO: 8370 - DNA, 10 bp, Artificial Sequence
  Synthetic Sequence
cgttgggaaa

SEQ ID NO: 8371 - DNA, 10 bp, Artificial Sequence
  Synthetic Sequence
tttacgcgat

SEQ ID NO: 8372 - DNA, 10 bp, Artificial Sequence
  Synthetic Sequence
gagtggactc

SEQ ID NO: 8373 - DNA, 10 bp, Artificial Sequence
  Synthetic Sequence
tatacgtatg

SEQ ID NO: 8374 - DNA, 10 bp, Artificial Sequence
  Synthetic Sequence
cgtactctga

SEQ ID NO: 8375 - DNA, 10 bp, Artificial Sequence
  Synthetic Sequence
tactgtgccg

SEQ ID NO: 8376 - DNA, 10 bp, Artificial Sequence
  Synthetic Sequence
gttggcacag

SEQ ID NO: 8377 - DNA, 10 bp, Artificial Sequence
  Synthetic Sequence
tagagcatga

SEQ ID NO: 8378 - DNA, 10 bp, Artificial Sequence
  Synthetic Sequence
agcggtagac

SEQ ID NO: 8379 - DNA, 10 bp, Artificial Sequence
  Synthetic Sequence
cgggtatcct

SEQ ID NO: 8380 - DNA, 10 bp, Artificial Sequence
  Synthetic Sequence
gccgagtgta

SEQ ID NO: 8381 - DNA, 10 bp, Artificial Sequence
  Synthetic Sequence
cgatcgccta

SEQ ID NO: 8382 - DNA, 10 bp, Artificial Sequence
  Synthetic Sequence
gacaaacaac

SEQ ID NO: 8383 - DNA, 10 bp, Artificial Sequence
  Synthetic Sequence
taatccacga

SEQ ID NO: 8384 - DNA, 10 bp, Artificial Sequence
  Synthetic Sequence
ggtagggcaa

SEQ ID NO: 8385 - DNA, 10 bp, Artificial Sequence
  Synthetic Sequence
aatgcgtgct

SEQ ID NO: 8386 - DNA, 10 bp, Artificial Sequence
  Synthetic Sequence
ccaaattatg

SEQ ID NO: 8387 - DNA, 10 bp, Artificial Sequence
  Synthetic Sequence
acgaaggttg

SEQ ID NO: 8388 - DNA, 10 bp, Artificial Sequence
  Synthetic Sequence
cattattcat

SEQ ID NO: 8389 - DNA, 10 bp, Artificial Sequence
  Synthetic Sequence
atttcgaatc

SEQ ID NO: 8390 - DNA, 10 bp, Artificial Sequence
  Synthetic Sequence
atggaatcca

SEQ ID NO: 8391 - DNA, 10 bp, Artificial Sequence
  Synthetic Sequence
ggacttgcat

SEQ ID NO: 8392 - DNA, 10 bp, Artificial Sequence
  Synthetic Sequence
cctttaggtg

SEQ ID NO: 8393 - DNA, 10 bp, Artificial Sequence
  Synthetic Sequence
tttcatcatc

SEQ ID NO: 8394 - DNA, 10 bp, Artificial Sequence
  Synthetic Sequence
agctagttgt

SEQ ID NO: 8395 - DNA, 10 bp, Artificial Sequence
  Synthetic Sequence
ccagagttac

SEQ ID NO: 8396 - DNA, 10 bp, Artificial Sequence
  Synthetic Sequence
gtaaccgcag

SEQ ID NO: 8397 - DNA, 10 bp, Artificial Sequence
  Synthetic Sequence
ggcttctccc

SEQ ID NO: 8398 - DNA, 10 bp, Artificial Sequence
  Synthetic Sequence
gaggaagtga

SEQ ID NO: 8399 - DNA, 10 bp, Artificial Sequence
  Synthetic Sequence
gtcccgattg

SEQ ID NO: 8400 - DNA, 10 bp, Artificial Sequence
  Synthetic Sequence
ctcctaggca

SEQ ID NO: 8401 - DNA, 10 bp, Artificial Sequence
  Synthetic Sequence
aaaccaccgt

SEQ ID NO: 8402 - DNA, 10 bp, Artificial Sequence
  Synthetic Sequence
tggtgtatgc

SEQ ID NO: 8403 - DNA, 10 bp, Artificial Sequence
  Synthetic Sequence
cgatattagg

SEQ ID NO: 8404 - DNA, 10 bp, Artificial Sequence
  Synthetic Sequence
tgcgtctgtg

SEQ ID NO: 8405 - DNA, 10 bp, Artificial Sequence
  Synthetic Sequence
gtatcagaag

SEQ ID NO: 8406 - DNA, 10 bp, Artificial Sequence
  Synthetic Sequence
gggagctgtc

SEQ ID NO: 8407 - DNA, 10 bp, Artificial Sequence
  Synthetic Sequence
cgtattccgg

SEQ ID NO: 8408 - DNA, 10 bp, Artificial Sequence
  Synthetic Sequence
ggcgacaacg

SEQ ID NO: 8409 - DNA, 10 bp, Artificial Sequence
  Synthetic Sequence
cacctcgatt

SEQ ID NO: 8410 - DNA, 10 bp, Artificial Sequence
  Synthetic Sequence
agggtacagg

SEQ ID NO: 8411 - DNA, 10 bp, Artificial Sequence
  Synthetic Sequence
gggctacacg

SEQ ID NO: 8412 - DNA, 10 bp, Artificial Sequence
  Synthetic Sequence
caccaagtta

SEQ ID NO: 8413 - DNA, 10 bp, Artificial Sequence
  Synthetic Sequence
gtcgactcta

SEQ ID NO: 8414 - DNA, 10 bp, Artificial Sequence
  Synthetic Sequence
tctgcctttg

SEQ ID NO: 8415 - DNA, 10 bp, Artificial Sequence
  Synthetic Sequence
agattcgaga

SEQ ID NO: 8416 - DNA, 10 bp, Artificial Sequence
  Synthetic Sequence
aagacaatca

SEQ ID NO: 8417 - DNA, 10 bp, Artificial Sequence
  Synthetic Sequence
tagctggagc

SEQ ID NO: 8418 - DNA, 10 bp, Artificial Sequence
  Synthetic Sequence
tagcctggtg

SEQ ID NO: 8419 - DNA, 10 bp, Artificial Sequence
  Synthetic Sequence
agtggctgcc

SEQ ID NO: 8420 - DNA, 10 bp, Artificial Sequence
  Synthetic Sequence
ttatgcgcac

SEQ ID NO: 8421 - DNA, 10 bp, Artificial Sequence
  Synthetic Sequence
tgtttgtatg

SEQ ID NO: 8422 - DNA, 10 bp, Artificial Sequence
  Synthetic Sequence
tagcctcaat

SEQ ID NO: 8423 - DNA, 10 bp, Artificial Sequence
  Synthetic Sequence
tctgaaacgt

SEQ ID NO: 8424 - DNA, 10 bp, Artificial Sequence
  Synthetic Sequence
gctagatcga

SEQ ID NO: 8425 - DNA, 10 bp, Artificial Sequence
  Synthetic Sequence
aataagtgga

SEQ ID NO: 8426 - DNA, 10 bp, Artificial Sequence
  Synthetic Sequence
gagtggcagc

SEQ ID NO: 8427 - DNA, 10 bp, Artificial Sequence
  Synthetic Sequence
aactcttcac

SEQ ID NO: 8428 - DNA, 10 bp, Artificial Sequence
  Synthetic Sequence
ggccttcaac

SEQ ID NO: 8429 - DNA, 10 bp, Artificial Sequence
  Synthetic Sequence
aggcgtacat

SEQ ID NO: 8430 - DNA, 10 bp, Artificial Sequence
  Synthetic Sequence
acccagacgg

SEQ ID NO: 8431 - DNA, 10 bp, Artificial Sequence
  Synthetic Sequence
acatcctcga

SEQ ID NO: 8432 - DNA, 10 bp, Artificial Sequence
  Synthetic Sequence
aaccttctag

SEQ ID NO: 8433 - DNA, 10 bp, Artificial Sequence
  Synthetic Sequence
taaatgcgta

SEQ ID NO: 8434 - DNA, 10 bp, Artificial Sequence
  Synthetic Sequence
gctttatatg

SEQ ID NO: 8435 - DNA, 10 bp, Artificial Sequence
  Synthetic Sequence
tcattcgggc

SEQ ID NO: 8436 - DNA, 10 bp, Artificial Sequence
  Synthetic Sequence
caatcccaag

SEQ ID NO: 8437 - DNA, 10 bp, Artificial Sequence
  Synthetic Sequence
ccagtccact

SEQ ID NO: 8438 - DNA, 10 bp, Artificial Sequence
  Synthetic Sequence
acccgagcac

SEQ ID NO: 8439 - DNA, 10 bp, Artificial Sequence
  Synthetic Sequence
tgggagtgcc

SEQ ID NO: 8440 - DNA, 10 bp, Artificial Sequence
  Synthetic Sequence
gatcaaagga

SEQ ID NO: 8441 - DNA, 10 bp, Artificial Sequence
  Synthetic Sequence
tgaggactac

SEQ ID NO: 8442 - DNA, 10 bp, Artificial Sequence
  Synthetic Sequence
atgggacact

SEQ ID NO: 8443 - DNA, 10 bp, Artificial Sequence
  Synthetic Sequence
taaggaaaga

SEQ ID NO: 8444 - DNA, 10 bp, Artificial Sequence
  Synthetic Sequence
aaatcacgag

SEQ ID NO: 8445 - DNA, 10 bp, Artificial Sequence
  Synthetic Sequence
catacacttg

SEQ ID NO: 8446 - DNA, 10 bp, Artificial Sequence
  Synthetic Sequence
tcacctagat

SEQ ID NO: 8447 - DNA, 10 bp, Artificial Sequence
  Synthetic Sequence
tctcacttac

SEQ ID NO: 8448 - DNA, 10 bp, Artificial Sequence
  Synthetic Sequence
gctaataagc

SEQ ID NO: 8449 - DNA, 10 bp, Artificial Sequence
  Synthetic Sequence
tcgcattatg

SEQ ID NO: 8450 - DNA, 10 bp, Artificial Sequence
  Synthetic Sequence
acttatactc

SEQ ID NO: 8451 - DNA, 10 bp, Artificial Sequence
  Synthetic Sequence
tgaaacttcg

SEQ ID NO: 8452 - DNA, 10 bp, Artificial Sequence
  Synthetic Sequence
ctactgtaaa

SEQ ID NO: 8453 - DNA, 10 bp, Artificial Sequence
  Synthetic Sequence
caaatgatct

SEQ ID NO: 8454 - DNA, 10 bp, Artificial Sequence
  Synthetic Sequence
acgcgcgtgt

SEQ ID NO: 8455 - DNA, 10 bp, Artificial Sequence
  Synthetic Sequence
cagtggcgac

SEQ ID NO: 8456 - DNA, 10 bp, Artificial Sequence
  Synthetic Sequence
tgaacacgtg

SEQ ID NO: 8457 - DNA, 10 bp, Artificial Sequence
  Synthetic Sequence
acgtacccaa

SEQ ID NO: 8458 - DNA, 10 bp, Artificial Sequence
  Synthetic Sequence
gagggtcgtt

SEQ ID NO: 8459 - DNA, 10 bp, Artificial Sequence
  Synthetic Sequence
gagacaattt

SEQ ID NO: 8460 - DNA, 10 bp, Artificial Sequence
  Synthetic Sequence
acttaatggt

SEQ ID NO: 8461 - DNA, 10 bp, Artificial Sequence
  Synthetic Sequence
cgatgcccag

SEQ ID NO: 8462 - DNA, 10 bp, Artificial Sequence
  Synthetic Sequence
ctgccttcga

SEQ ID NO: 8463 - DNA, 10 bp, Artificial Sequence
  Synthetic Sequence
ggactgtggg

SEQ ID NO: 8464 - DNA, 10 bp, Artificial Sequence
  Synthetic Sequence
gaaatcccgg

SEQ ID NO: 8465 - DNA, 10 bp, Artificial Sequence
  Synthetic Sequence
gcggaatcag

SEQ ID NO: 8466 - DNA, 10 bp, Artificial Sequence
  Synthetic Sequence
gagcacgtgc

SEQ ID NO: 8467 - DNA, 10 bp, Artificial Sequence
  Synthetic Sequence
gtaggcgcta

SEQ ID NO: 8468 - DNA, 10 bp, Artificial Sequence
  Synthetic Sequence
tcgtcgcacc

SEQ ID NO: 8469 - DNA, 10 bp, Artificial Sequence
  Synthetic Sequence
atacaagggc

SEQ ID NO: 8470 - DNA, 10 bp, Artificial Sequence
  Synthetic Sequence
aattcgattt

SEQ ID NO: 8471 - DNA, 10 bp, Artificial Sequence
  Synthetic Sequence
taggttcctt

SEQ ID NO: 8472 - DNA, 10 bp, Artificial Sequence
  Synthetic Sequence
tgtttgttat

SEQ ID NO: 8473 - DNA, 10 bp, Artificial Sequence
  Synthetic Sequence
aggtttcggc

SEQ ID NO: 8474 - DNA, 10 bp, Artificial Sequence
  Synthetic Sequence
ctacggcgaa

SEQ ID NO: 8475 - DNA, 10 bp, Artificial Sequence
  Synthetic Sequence
gcgaagctta

SEQ ID NO: 8476 - DNA, 10 bp, Artificial Sequence
  Synthetic Sequence
ctgtgaatgg

SEQ ID NO: 8477 - DNA, 10 bp, Artificial Sequence
  Synthetic Sequence
tctaaagctt

SEQ ID NO: 8478 - DNA, 10 bp, Artificial Sequence
  Synthetic Sequence
gagggtagcc

SEQ ID NO: 8479 - DNA, 10 bp, Artificial Sequence
  Synthetic Sequence
ccattcggaa

SEQ ID NO: 8480 - DNA, 10 bp, Artificial Sequence
  Synthetic Sequence
taccgctact

SEQ ID NO: 8481 - DNA, 10 bp, Artificial Sequence
  Synthetic Sequence
taactatctt

SEQ ID NO: 8482 - DNA, 10 bp, Artificial Sequence
  Synthetic Sequence
ttgccgcgga

SEQ ID NO: 8483 - DNA, 10 bp, Artificial Sequence
  Synthetic Sequence
gtacggaagt

SEQ ID NO: 8484 - DNA, 10 bp, Artificial Sequence
  Synthetic Sequence
catgagggaa

SEQ ID NO: 8485 - DNA, 10 bp, Artificial Sequence
  Synthetic Sequence
atctccagcg

SEQ ID NO: 8486 - DNA, 10 bp, Artificial Sequence
  Synthetic Sequence
gagtgttcgt

SEQ ID NO: 8487 - DNA, 10 bp, Artificial Sequence
  Synthetic Sequence
tctgaggtgt

SEQ ID NO: 8488 - DNA, 10 bp, Artificial Sequence
  Synthetic Sequence
tgctagcatt

SEQ ID NO: 8489 - DNA, 10 bp, Artificial Sequence
  Synthetic Sequence
tacgatacgc

SEQ ID NO: 8490 - DNA, 10 bp, Artificial Sequence
  Synthetic Sequence
agccagcaca

SEQ ID NO: 8491 - DNA, 10 bp, Artificial Sequence
  Synthetic Sequence
ccaggagctc

SEQ ID NO: 8492 - DNA, 10 bp, Artificial Sequence
  Synthetic Sequence
ttagatgata

SEQ ID NO: 8493 - DNA, 10 bp, Artificial Sequence
  Synthetic Sequence
ccctcctttc

SEQ ID NO: 8494 - DNA, 10 bp, Artificial Sequence
  Synthetic Sequence
aatcatgtag

SEQ ID NO: 8495 - DNA, 10 bp, Artificial Sequence
  Synthetic Sequence
tagcggtggg

SEQ ID NO: 8496 - DNA, 10 bp, Artificial Sequence
  Synthetic Sequence
tgttaccaga

SEQ ID NO: 8497 - DNA, 10 bp, Artificial Sequence
  Synthetic Sequence
caacgctcca

SEQ ID NO: 8498 - DNA, 10 bp, Artificial Sequence
  Synthetic Sequence
acgcatgcgt

SEQ ID NO: 8499 - DNA, 10 bp, Artificial Sequence
  Synthetic Sequence
acacaataca

SEQ ID NO: 8500 - DNA, 10 bp, Artificial Sequence
  Synthetic Sequence
ctttcttggg

SEQ ID NO: 8501 - DNA, 10 bp, Artificial Sequence
  Synthetic Sequence
gaggatgaac

SEQ ID NO: 8502 - DNA, 10 bp, Artificial Sequence
  Synthetic Sequence
ggccagagtg

SEQ ID NO: 8503 - DNA, 10 bp, Artificial Sequence
  Synthetic Sequence
ctgcagccag

SEQ ID NO: 8504 - DNA, 10 bp, Artificial Sequence
  Synthetic Sequence
cgaacgcact

SEQ ID NO: 8505 - DNA, 10 bp, Artificial Sequence
  Synthetic Sequence
tcatcgacgg

SEQ ID NO: 8506 - DNA, 10 bp, Artificial Sequence
  Synthetic Sequence
ctgcacatga

SEQ ID NO: 8507 - DNA, 10 bp, Artificial Sequence
  Synthetic Sequence
tcttacgatt

SEQ ID NO: 8508 - DNA, 10 bp, Artificial Sequence
  Synthetic Sequence
aatcacgggt

SEQ ID NO: 8509 - DNA, 10 bp, Artificial Sequence
  Synthetic Sequence
tccatccgga

SEQ ID NO: 8510 - DNA, 10 bp, Artificial Sequence
  Synthetic Sequence
gtagatagaa

SEQ ID NO: 8511 - DNA, 10 bp, Artificial Sequence
  Synthetic Sequence
ggcgctttcg

SEQ ID NO: 8512 - DNA, 10 bp, Artificial Sequence
  Synthetic Sequence
agggctccag

SEQ ID NO: 8513 - DNA, 10 bp, Artificial Sequence
  Synthetic Sequence
cttcgaaggc

SEQ ID NO: 8514 - DNA, 10 bp, Artificial Sequence
  Synthetic Sequence
ttaccacacg

SEQ ID NO: 8515 - DNA, 10 bp, Artificial Sequence
  Synthetic Sequence
atgggaatag

SEQ ID NO: 8516 - DNA, 10 bp, Artificial Sequence
  Synthetic Sequence
atttaaggcc

SEQ ID NO: 8517 - DNA, 10 bp, Artificial Sequence
  Synthetic Sequence
cgtgacccag

SEQ ID NO: 8518 - DNA, 10 bp, Artificial Sequence
  Synthetic Sequence
ctctacctag

SEQ ID NO: 8519 - DNA, 10 bp, Artificial Sequence
  Synthetic Sequence
ctcgtggtca

SEQ ID NO: 8520 - DNA, 10 bp, Artificial Sequence
  Synthetic Sequence
gggccatcag

SEQ ID NO: 8521 - DNA, 10 bp, Artificial Sequence
  Synthetic Sequence
cgcgatatag

SEQ ID NO: 8522 - DNA, 10 bp, Artificial Sequence
  Synthetic Sequence
aggtagcaac

SEQ ID NO: 8523 - DNA, 10 bp, Artificial Sequence
  Synthetic Sequence
gggcgtcttc

SEQ ID NO: 8524 - DNA, 10 bp, Artificial Sequence
  Synthetic Sequence
acgccatagg

SEQ ID NO: 8525 - DNA, 10 bp, Artificial Sequence
  Synthetic Sequence
acctgtcggc

SEQ ID NO: 8526 - DNA, 10 bp, Artificial Sequence
  Synthetic Sequence
agagccgtgt

SEQ ID NO: 8527 - DNA, 10 bp, Artificial Sequence
  Synthetic Sequence
tcgggtggaa

SEQ ID NO: 8528 - DNA, 10 bp, Artificial Sequence
  Synthetic Sequence
gtagagtgcc

SEQ ID NO: 8529 - DNA, 10 bp, Artificial Sequence
  Synthetic Sequence
gacctactgt

SEQ ID NO: 8530 - DNA, 10 bp, Artificial Sequence
  Synthetic Sequence
aatcctagct

SEQ ID NO: 8531 - DNA, 10 bp, Artificial Sequence
  Synthetic Sequence
tcttgtcgct

SEQ ID NO: 8532 - DNA, 10 bp, Artificial Sequence
  Synthetic Sequence
gaccaagccg

SEQ ID NO: 8533 - DNA, 10 bp, Artificial Sequence
  Synthetic Sequence
gcacacaagt

SEQ ID NO: 8534 - DNA, 10 bp, Artificial Sequence
  Synthetic Sequence
tttggccgcc

SEQ ID NO: 8535 - DNA, 10 bp, Artificial Sequence
  Synthetic Sequence
aatttcgata

SEQ ID NO: 8536 - DNA, 10 bp, Artificial Sequence
  Synthetic Sequence
gacgctaccg

SEQ ID NO: 8537 - DNA, 10 bp, Artificial Sequence
  Synthetic Sequence
tgtacccgta

SEQ ID NO: 8538 - DNA, 10 bp, Artificial Sequence
  Synthetic Sequence
gctcgcggtt

SEQ ID NO: 8539 - DNA, 10 bp, Artificial Sequence
  Synthetic Sequence
tgactagtcg

SEQ ID NO: 8540 - DNA, 10 bp, Artificial Sequence
  Synthetic Sequence
ggcggtaact

SEQ ID NO: 8541 - DNA, 10 bp, Artificial Sequence
  Synthetic Sequence
aggtttagct

SEQ ID NO: 8542 - DNA, 10 bp, Artificial Sequence
  Synthetic Sequence
ggctgacatt

SEQ ID NO: 8543 - DNA, 10 bp, Artificial Sequence
  Synthetic Sequence
gcttctgact

SEQ ID NO: 8544 - DNA, 10 bp, Artificial Sequence
  Synthetic Sequence
tgaactgaca

SEQ ID NO: 8545 - DNA, 10 bp, Artificial Sequence
  Synthetic Sequence
ccattgggtt

SEQ ID NO: 8546 - DNA, 10 bp, Artificial Sequence
  Synthetic Sequence
ttgatagatg

SEQ ID NO: 8547 - DNA, 10 bp, Artificial Sequence
  Synthetic Sequence
ctcctgctaa

SEQ ID NO: 8548 - DNA, 10 bp, Artificial Sequence
  Synthetic Sequence
gttacgagcg

SEQ ID NO: 8549 - DNA, 10 bp, Artificial Sequence
  Synthetic Sequence
atcaaaggaa

SEQ ID NO: 8550 - DNA, 10 bp, Artificial Sequence
  Synthetic Sequence
atcacggatt

SEQ ID NO: 8551 - DNA, 10 bp, Artificial Sequence
  Synthetic Sequence
tgctatttgg

SEQ ID NO: 8552 - DNA, 10 bp, Artificial Sequence
  Synthetic Sequence
tgtcatctag

SEQ ID NO: 8553 - DNA, 10 bp, Artificial Sequence
  Synthetic Sequence
aatatgcgaa

SEQ ID NO: 8554 - DNA, 10 bp, Artificial Sequence
  Synthetic Sequence
aataacgatc

SEQ ID NO: 8555 - DNA, 10 bp, Artificial Sequence
  Synthetic Sequence
caagcaccga

SEQ ID NO: 8556 - DNA, 10 bp, Artificial Sequence
  Synthetic Sequence
gaaatcgagt

SEQ ID NO: 8557 - DNA, 10 bp, Artificial Sequence
  Synthetic Sequence
aatttccaag

SEQ ID NO: 8558 - DNA, 10 bp, Artificial Sequence
  Synthetic Sequence
cgattacaac

SEQ ID NO: 8559 - DNA, 10 bp, Artificial Sequence
  Synthetic Sequence
aagtgcccga

SEQ ID NO: 8560 - DNA, 10 bp, Artificial Sequence
  Synthetic Sequence
acttcgtcaa

SEQ ID NO: 8561 - DNA, 10 bp, Artificial Sequence
  Synthetic Sequence
ctatgttctg

SEQ ID NO: 8562 - DNA, 10 bp, Artificial Sequence
  Synthetic Sequence
tgtagcccgt

SEQ ID NO: 8563 - DNA, 10 bp, Artificial Sequence
  Synthetic Sequence
ctgctggcac

SEQ ID NO: 8564 - DNA, 10 bp, Artificial Sequence
  Synthetic Sequence
ccggaataat

SEQ ID NO: 8565 - DNA, 10 bp, Artificial Sequence
  Synthetic Sequence
gactacgtgg

SEQ ID NO: 8566 - DNA, 10 bp, Artificial Sequence
  Synthetic Sequence
gagcctctct

SEQ ID NO: 8567 - DNA, 10 bp, Artificial Sequence
  Synthetic Sequence
cccaggagac

SEQ ID NO: 8568 - DNA, 10 bp, Artificial Sequence
  Synthetic Sequence
acgtagaagt

SEQ ID NO: 8569 - DNA, 10 bp, Artificial Sequence
  Synthetic Sequence
ggttcggagt

SEQ ID NO: 8570 - DNA, 10 bp, Artificial Sequence
  Synthetic Sequence
tcaatctcga

SEQ ID NO: 8571 - DNA, 10 bp, Artificial Sequence
  Synthetic Sequence
ggtcaccttt

SEQ ID NO: 8572 - DNA, 10 bp, Artificial Sequence
  Synthetic Sequence
ggtagtaacc

SEQ ID NO: 8573 - DNA, 10 bp, Artificial Sequence
  Synthetic Sequence
acgagtacaa

SEQ ID NO: 8574 - DNA, 10 bp, Artificial Sequence
  Synthetic Sequence
ccagaccgga

SEQ ID NO: 8575 - DNA, 10 bp, Artificial Sequence
  Synthetic Sequence
aaaggaccgc

SEQ ID NO: 8576 - DNA, 10 bp, Artificial Sequence
  Synthetic Sequence
ctccatgaga

SEQ ID NO: 8577 - DNA, 10 bp, Artificial Sequence
  Synthetic Sequence
attgctttgg

SEQ ID NO: 8578 - DNA, 10 bp, Artificial Sequence
  Synthetic Sequence
ccgacgccaa

SEQ ID NO: 8579 - DNA, 10 bp, Artificial Sequence
  Synthetic Sequence
ctgaggagcg

SEQ ID NO: 8580 - DNA, 10 bp, Artificial Sequence
  Synthetic Sequence
aggaaccgct

SEQ ID NO: 8581 - DNA, 10 bp, Artificial Sequence
  Synthetic Sequence
gggtatagtc

SEQ ID NO: 8582 - DNA, 10 bp, Artificial Sequence
  Synthetic Sequence
gcaatcttta

SEQ ID NO: 8583 - DNA, 10 bp, Artificial Sequence
  Synthetic Sequence
ggttacatct

SEQ ID NO: 8584 - DNA, 10 bp, Artificial Sequence
  Synthetic Sequence
caacacctac

SEQ ID NO: 8585 - DNA, 10 bp, Artificial Sequence
  Synthetic Sequence
cgctagtatc

SEQ ID NO: 8586 - DNA, 10 bp, Artificial Sequence
  Synthetic Sequence
tctaaacgaa

SEQ ID NO: 8587 - DNA, 10 bp, Artificial Sequence
  Synthetic Sequence
caagttatgt

SEQ ID NO: 8588 - DNA, 10 bp, Artificial Sequence
  Synthetic Sequence
aaaccatgct

SEQ ID NO: 8589 - DNA, 10 bp, Artificial Sequence
  Synthetic Sequence
tgtgattgat

SEQ ID NO: 8590 - DNA, 10 bp, Artificial Sequence
  Synthetic Sequence
aggtgctctt

SEQ ID NO: 8591 - DNA, 10 bp, Artificial Sequence
  Synthetic Sequence
aggatggtac

SEQ ID NO: 8592 - DNA, 10 bp, Artificial Sequence
  Synthetic Sequence
aatgcaccct

SEQ ID NO: 8593 - DNA, 10 bp, Artificial Sequence
  Synthetic Sequence
cggtctctac

SEQ ID NO: 8594 - DNA, 10 bp, Artificial Sequence
  Synthetic Sequence
ctcttaaagg

SEQ ID NO: 8595 - DNA, 10 bp, Artificial Sequence
  Synthetic Sequence
atagattcct

SEQ ID NO: 8596 - DNA, 10 bp, Artificial Sequence
  Synthetic Sequence
tccagttgta

SEQ ID NO: 8597 - DNA, 10 bp, Artificial Sequence
  Synthetic Sequence
gctttaatga

SEQ ID NO: 8598 - DNA, 10 bp, Artificial Sequence
  Synthetic Sequence
gctacagagc

SEQ ID NO: 8599 - DNA, 10 bp, Artificial Sequence
  Synthetic Sequence
gcgatgctgg

SEQ ID NO: 8600 - DNA, 10 bp, Artificial Sequence
  Synthetic Sequence
gagacgacct

SEQ ID NO: 8601 - DNA, 10 bp, Artificial Sequence
  Synthetic Sequence
ttggtagctt

SEQ ID NO: 8602 - DNA, 10 bp, Artificial Sequence
  Synthetic Sequence
tagcacgagt

SEQ ID NO: 8603 - DNA, 10 bp, Artificial Sequence
  Synthetic Sequence
ctcgtgagtg

SEQ ID NO: 8604 - DNA, 10 bp, Artificial Sequence
  Synthetic Sequence
catgaaatca

SEQ ID NO: 8605 - DNA, 10 bp, Artificial Sequence
  Synthetic Sequence
cgtgtttagc

SEQ ID NO: 8606 - DNA, 10 bp, Artificial Sequence
  Synthetic Sequence
aatttgacaa

SEQ ID NO: 8607 - DNA, 10 bp, Artificial Sequence
  Synthetic Sequence
tgaagaaatt

SEQ ID NO: 8608 - DNA, 10 bp, Artificial Sequence
  Synthetic Sequence
tctgcataag

SEQ ID NO: 8609 - DNA, 10 bp, Artificial Sequence
  Synthetic Sequence
tcgtcatatc

SEQ ID NO: 8610 - DNA, 10 bp, Artificial Sequence
  Synthetic Sequence
aacctaataa

SEQ ID NO: 8611 - DNA, 10 bp, Artificial Sequence
  Synthetic Sequence
agctcttggt

SEQ ID NO: 8612 - DNA, 10 bp, Artificial Sequence
  Synthetic Sequence
aacgctatgc

SEQ ID NO: 8613 - DNA, 10 bp, Artificial Sequence
  Synthetic Sequence
gtaaatcaac

SEQ ID NO: 8614 - DNA, 10 bp, Artificial Sequence
  Synthetic Sequence
ctgtggtggc

SEQ ID NO: 8615 - DNA, 10 bp, Artificial Sequence
  Synthetic Sequence
ttctgtttcg

SEQ ID NO: 8616 - DNA, 10 bp, Artificial Sequence
  Synthetic Sequence
ccacgcatac

SEQ ID NO: 8617 - DNA, 10 bp, Artificial Sequence
  Synthetic Sequence
atcgagacaa

SEQ ID NO: 8618 - DNA, 10 bp, Artificial Sequence
  Synthetic Sequence
tcaacgcacg

SEQ ID NO: 8619 - DNA, 10 bp, Artificial Sequence
  Synthetic Sequence
tacccagctg

SEQ ID NO: 8620 - DNA, 10 bp, Artificial Sequence
  Synthetic Sequence
actgttatat

SEQ ID NO: 8621 - DNA, 10 bp, Artificial Sequence
  Synthetic Sequence
ttgtgcacgt

SEQ ID NO: 8622 - DNA, 10 bp, Artificial Sequence
  Synthetic Sequence
gacgaatgga

SEQ ID NO: 8623 - DNA, 10 bp, Artificial Sequence
  Synthetic Sequence
agatcggaac

SEQ ID NO: 8624 - DNA, 10 bp, Artificial Sequence
  Synthetic Sequence
caaatcgaca

SEQ ID NO: 8625 - DNA, 10 bp, Artificial Sequence
  Synthetic Sequence
gcaacgcaga

SEQ ID NO: 8626 - DNA, 10 bp, Artificial Sequence
  Synthetic Sequence
gtctacaata

SEQ ID NO: 8627 - DNA, 10 bp, Artificial Sequence
  Synthetic Sequence
tagatgcttg

SEQ ID NO: 8628 - DNA, 10 bp, Artificial Sequence
  Synthetic Sequence
aaagaatggg

SEQ ID NO: 8629 - DNA, 10 bp, Artificial Sequence
  Synthetic Sequence
taaagcatag

SEQ ID NO: 8630 - DNA, 10 bp, Artificial Sequence
  Synthetic Sequence
ggcgaataag

SEQ ID NO: 8631 - DNA, 10 bp, Artificial Sequence
  Synthetic Sequence
ggacgggctt

SEQ ID NO: 8632 - DNA, 10 bp, Artificial Sequence
  Synthetic Sequence
cagcccggtt

SEQ ID NO: 8633 - DNA, 10 bp, Artificial Sequence
  Synthetic Sequence
gtgaagtgct

SEQ ID NO: 8634 - DNA, 10 bp, Artificial Sequence
  Synthetic Sequence
tcaatcatgg

SEQ ID NO: 8635 - DNA, 10 bp, Artificial Sequence
  Synthetic Sequence
taattaatgt

SEQ ID NO: 8636 - DNA, 10 bp, Artificial Sequence
  Synthetic Sequence
gtgaacaagc

SEQ ID NO: 8637 - DNA, 10 bp, Artificial Sequence
  Synthetic Sequence
ctggagctca

SEQ ID NO: 8638 - DNA, 10 bp, Artificial Sequence
  Synthetic Sequence
taccctgtac

SEQ ID NO: 8639 - DNA, 10 bp, Artificial Sequence
  Synthetic Sequence
ggtctactag

SEQ ID NO: 8640 - DNA, 10 bp, Artificial Sequence
  Synthetic Sequence
tgctaccggg

SEQ ID NO: 8641 - DNA, 10 bp, Artificial Sequence
  Synthetic Sequence
cacgcactaa

SEQ ID NO: 8642 - DNA, 10 bp, Artificial Sequence
  Synthetic Sequence
cgtatcaact

SEQ ID NO: 8643 - DNA, 10 bp, Artificial Sequence
  Synthetic Sequence
cagtctgagg

SEQ ID NO: 8644 - DNA, 10 bp, Artificial Sequence
  Synthetic Sequence
gcacgacaaa

SEQ ID NO: 8645 - DNA, 10 bp, Artificial Sequence
  Synthetic Sequence
gtccgtggtg

SEQ ID NO: 8646 - DNA, 10 bp, Artificial Sequence
  Synthetic Sequence
ctcactcttt

SEQ ID NO: 8647 - DNA, 10 bp, Artificial Sequence
  Synthetic Sequence
taaccctccg

SEQ ID NO: 8648 - DNA, 10 bp, Artificial Sequence
  Synthetic Sequence
aaagattcaa

SEQ ID NO: 8649 - DNA, 10 bp, Artificial Sequence
  Synthetic Sequence
aggttagcgt

SEQ ID NO: 8650 - DNA, 10 bp, Artificial Sequence
  Synthetic Sequence
acaaggatga

SEQ ID NO: 8651 - DNA, 10 bp, Artificial Sequence
  Synthetic Sequence
ggtcacgaca

SEQ ID NO: 8652 - DNA, 10 bp, Artificial Sequence
  Synthetic Sequence
ttattggctg

SEQ ID NO: 8653 - DNA, 10 bp, Artificial Sequence
  Synthetic Sequence
atagccgtaa

SEQ ID NO: 8654 - DNA, 10 bp, Artificial Sequence
  Synthetic Sequence
gggcgtttat

SEQ ID NO: 8655 - DNA, 10 bp, Artificial Sequence
  Synthetic Sequence
tactcataaa

SEQ ID NO: 8656 - DNA, 10 bp, Artificial Sequence
  Synthetic Sequence
ctgtcctgac

SEQ ID NO: 8657 - DNA, 10 bp, Artificial Sequence
  Synthetic Sequence
tttgctgacg

SEQ ID NO: 8658 - DNA, 10 bp, Artificial Sequence
  Synthetic Sequence
cccttgcatt

SEQ ID NO: 8659 - DNA, 10 bp, Artificial Sequence
  Synthetic Sequence
agggtctcac

SEQ ID NO: 8660 - DNA, 10 bp, Artificial Sequence
  Synthetic Sequence
attccgcctt

SEQ ID NO: 8661 - DNA, 10 bp, Artificial Sequence
  Synthetic Sequence
gtagggatcg

SEQ ID NO: 8662 - DNA, 10 bp, Artificial Sequence
  Synthetic Sequence
tgacgaaggg

SEQ ID NO: 8663 - DNA, 10 bp, Artificial Sequence
  Synthetic Sequence
gcatcactcc

SEQ ID NO: 8664 - DNA, 10 bp, Artificial Sequence
  Synthetic Sequence
cacgcaacgc

SEQ ID NO: 8665 - DNA, 10 bp, Artificial Sequence
  Synthetic Sequence
cactctacta

SEQ ID NO: 8666 - DNA, 10 bp, Artificial Sequence
  Synthetic Sequence
cacgccgcaa

SEQ ID NO: 8667 - DNA, 10 bp, Artificial Sequence
  Synthetic Sequence
gagagggaat

SEQ ID NO: 8668 - DNA, 10 bp, Artificial Sequence
  Synthetic Sequence
cagagtcgcg

SEQ ID NO: 8669 - DNA, 10 bp, Artificial Sequence
  Synthetic Sequence
gcaccaataa

SEQ ID NO: 8670 - DNA, 10 bp, Artificial Sequence
  Synthetic Sequence
ctaccagact

SEQ ID NO: 8671 - DNA, 10 bp, Artificial Sequence
  Synthetic Sequence
ggctgatgca

SEQ ID NO: 8672 - DNA, 10 bp, Artificial Sequence
  Synthetic Sequence
cgcactgatg

SEQ ID NO: 8673 - DNA, 10 bp, Artificial Sequence
  Synthetic Sequence
catttctttg

SEQ ID NO: 8674 - DNA, 10 bp, Artificial Sequence
  Synthetic Sequence
tgaagaacgc

SEQ ID NO: 8675 - DNA, 10 bp, Artificial Sequence
  Synthetic Sequence
caatccctct

SEQ ID NO: 8676 - DNA, 10 bp, Artificial Sequence
  Synthetic Sequence
ccgacgatcg

SEQ ID NO: 8677 - DNA, 10 bp, Artificial Sequence
  Synthetic Sequence
cctggacatt

SEQ ID NO: 8678 - DNA, 10 bp, Artificial Sequence
  Synthetic Sequence
gccgcccaat

SEQ ID NO: 8679 - DNA, 10 bp, Artificial Sequence
  Synthetic Sequence
tctgccacgc

SEQ ID NO: 8680 - DNA, 10 bp, Artificial Sequence
  Synthetic Sequence
gccctgaaca

SEQ ID NO: 8681 - DNA, 10 bp, Artificial Sequence
  Synthetic Sequence
cggccacttg

SEQ ID NO: 8682 - DNA, 10 bp, Artificial Sequence
  Synthetic Sequence
tggagtctcg

SEQ ID NO: 8683 - DNA, 10 bp, Artificial Sequence
  Synthetic Sequence
ggttacaatc

SEQ ID NO: 8684 - DNA, 10 bp, Artificial Sequence
  Synthetic Sequence
atggagagga

SEQ ID NO: 8685 - DNA, 10 bp, Artificial Sequence
  Synthetic Sequence
tccttgatga

SEQ ID NO: 8686 - DNA, 10 bp, Artificial Sequence
  Synthetic Sequence
tttacgtact

SEQ ID NO: 8687 - DNA, 10 bp, Artificial Sequence
  Synthetic Sequence
ccctccagtt

SEQ ID NO: 8688 - DNA, 10 bp, Artificial Sequence
  Synthetic Sequence
ctcgcctggt

SEQ ID NO: 8689 - DNA, 10 bp, Artificial Sequence
  Synthetic Sequence
agtggtccac

SEQ ID NO: 8690 - DNA, 10 bp, Artificial Sequence
  Synthetic Sequence
gactcagatt

SEQ ID NO: 8691 - DNA, 10 bp, Artificial Sequence
  Synthetic Sequence
gtctgttagt

SEQ ID NO: 8692 - DNA, 10 bp, Artificial Sequence
  Synthetic Sequence
cacacttccc

SEQ ID NO: 8693 - DNA, 10 bp, Artificial Sequence
  Synthetic Sequence
gcctgagtgg

SEQ ID NO: 8694 - DNA, 10 bp, Artificial Sequence
  Synthetic Sequence
aggcatttcc

SEQ ID NO: 8695 - DNA, 10 bp, Artificial Sequence
  Synthetic Sequence
tggtgggcca

SEQ ID NO: 8696 - DNA, 10 bp, Artificial Sequence
  Synthetic Sequence
tagcacatac

SEQ ID NO: 8697 - DNA, 10 bp, Artificial Sequence
  Synthetic Sequence
acaactctgt

SEQ ID NO: 8698 - DNA, 10 bp, Artificial Sequence
  Synthetic Sequence
aagcgtcggg

SEQ ID NO: 8699 - DNA, 10 bp, Artificial Sequence
  Synthetic Sequence
ttagagattt

SEQ ID NO: 8700 - DNA, 10 bp, Artificial Sequence
  Synthetic Sequence
tattacctca

SEQ ID NO: 8701 - DNA, 10 bp, Artificial Sequence
  Synthetic Sequence
tgaggcgcca

SEQ ID NO: 8702 - DNA, 10 bp, Artificial Sequence
  Synthetic Sequence
gttgagaatc

SEQ ID NO: 8703 - DNA, 10 bp, Artificial Sequence
  Synthetic Sequence
acggcggaga

SEQ ID NO: 8704 - DNA, 10 bp, Artificial Sequence
  Synthetic Sequence
ttagacacta

SEQ ID NO: 8705 - DNA, 10 bp, Artificial Sequence
  Synthetic Sequence
agccaagtgg

SEQ ID NO: 8706 - DNA, 10 bp, Artificial Sequence
  Synthetic Sequence
tctactgcac

SEQ ID NO: 8707 - DNA, 10 bp, Artificial Sequence
  Synthetic Sequence
gccgggtaat

SEQ ID NO: 8708 - DNA, 10 bp, Artificial Sequence
  Synthetic Sequence
agcgctctat

SEQ ID NO: 8709 - DNA, 10 bp, Artificial Sequence
  Synthetic Sequence
tatatatttg

SEQ ID NO: 8710 - DNA, 10 bp, Artificial Sequence
  Synthetic Sequence
gatggtcccg

SEQ ID NO: 8711 - DNA, 10 bp, Artificial Sequence
  Synthetic Sequence
gatcgttgcc

SEQ ID NO: 8712 - DNA, 10 bp, Artificial Sequence
  Synthetic Sequence
gggccaacgt

SEQ ID NO: 8713 - DNA, 10 bp, Artificial Sequence
  Synthetic Sequence
agatcgtgaa

SEQ ID NO: 8714 - DNA, 10 bp, Artificial Sequence
  Synthetic Sequence
ggagtactcg

SEQ ID NO: 8715 - DNA, 10 bp, Artificial Sequence
  Synthetic Sequence
ataacagccg

SEQ ID NO: 8716 - DNA, 10 bp, Artificial Sequence
  Synthetic Sequence
gccctaagtg

SEQ ID NO: 8717 - DNA, 10 bp, Artificial Sequence
  Synthetic Sequence
taaatgtatt

SEQ ID NO: 8718 - DNA, 10 bp, Artificial Sequence
  Synthetic Sequence
aaagaccgca

SEQ ID NO: 8719 - DNA, 10 bp, Artificial Sequence
  Synthetic Sequence
aacatctcaa

SEQ ID NO: 8720 - DNA, 10 bp, Artificial Sequence
  Synthetic Sequence
taaattgtgg

SEQ ID NO: 8721 - DNA, 10 bp, Artificial Sequence
  Synthetic Sequence
gtgcacatcc

SEQ ID NO: 8722 - DNA, 10 bp, Artificial Sequence
  Synthetic Sequence
acttcgctcg

SEQ ID NO: 8723 - DNA, 10 bp, Artificial Sequence
  Synthetic Sequence
gactgaacgc

SEQ ID NO: 8724 - DNA, 10 bp, Artificial Sequence
  Synthetic Sequence
gccatgggtc

SEQ ID NO: 8725 - DNA, 10 bp, Artificial Sequence
  Synthetic Sequence
cacctcgcga

SEQ ID NO: 8726 - DNA, 10 bp, Artificial Sequence
  Synthetic Sequence
atttcttatg

SEQ ID NO: 8727 - DNA, 10 bp, Artificial Sequence
  Synthetic Sequence
gttggtgcat

SEQ ID NO: 8728 - DNA, 10 bp, Artificial Sequence
  Synthetic Sequence
gagaccgctg

SEQ ID NO: 8729 - DNA, 10 bp, Artificial Sequence
  Synthetic Sequence
atagactgta

SEQ ID NO: 8730 - DNA, 10 bp, Artificial Sequence
  Synthetic Sequence
gcacctgctt

SEQ ID NO: 8731 - DNA, 10 bp, Artificial Sequence
  Synthetic Sequence
gctggtacgg

SEQ ID NO: 8732 - DNA, 10 bp, Artificial Sequence
  Synthetic Sequence
ctggccctag

SEQ ID NO: 8733 - DNA, 10 bp, Artificial Sequence
  Synthetic Sequence
gtacatggtc

SEQ ID NO: 8734 - DNA, 10 bp, Artificial Sequence
  Synthetic Sequence
cgttgccaat

SEQ ID NO: 8735 - DNA, 10 bp, Artificial Sequence
  Synthetic Sequence
cttacctacg

SEQ ID NO: 8736 - DNA, 10 bp, Artificial Sequence
  Synthetic Sequence
tagggcggat

SEQ ID NO: 8737 - DNA, 10 bp, Artificial Sequence
  Synthetic Sequence
ctccagtgcg

SEQ ID NO: 8738 - DNA, 10 bp, Artificial Sequence
  Synthetic Sequence
gccgtattca

SEQ ID NO: 8739 - DNA, 10 bp, Artificial Sequence
  Synthetic Sequence
acgtaaaccc

SEQ ID NO: 8740 - DNA, 10 bp, Artificial Sequence
  Synthetic Sequence
acagaatgac

SEQ ID NO: 8741 - DNA, 10 bp, Artificial Sequence
  Synthetic Sequence
gtgacctact

SEQ ID NO: 8742 - DNA, 10 bp, Artificial Sequence
  Synthetic Sequence
aagatagttg

SEQ ID NO: 8743 - DNA, 10 bp, Artificial Sequence
  Synthetic Sequence
ttgaatacgt

SEQ ID NO: 8744 - DNA, 10 bp, Artificial Sequence
  Synthetic Sequence
gattggaggt

SEQ ID NO: 8745 - DNA, 10 bp, Artificial Sequence
  Synthetic Sequence
taaacgttag

SEQ ID NO: 8746 - DNA, 10 bp, Artificial Sequence
  Synthetic Sequence
tcgctctaac

SEQ ID NO: 8747 - DNA, 10 bp, Artificial Sequence
  Synthetic Sequence
gtattgtcta

SEQ ID NO: 8748 - DNA, 10 bp, Artificial Sequence
  Synthetic Sequence
agtgagtacc

SEQ ID NO: 8749 - DNA, 10 bp, Artificial Sequence
  Synthetic Sequence
aacgaataaa

SEQ ID NO: 8750 - DNA, 10 bp, Artificial Sequence
  Synthetic Sequence
cagagacggc

SEQ ID NO: 8751 - DNA, 10 bp, Artificial Sequence
  Synthetic Sequence
gctagtagta

SEQ ID NO: 8752 - DNA, 10 bp, Artificial Sequence
  Synthetic Sequence
ttcaggtgtt

SEQ ID NO: 8753 - DNA, 10 bp, Artificial Sequence
  Synthetic Sequence
agccaaccag

SEQ ID NO: 8754 - DNA, 10 bp, Artificial Sequence
  Synthetic Sequence
cgtaactgcg

SEQ ID NO: 8755 - DNA, 10 bp, Artificial Sequence
  Synthetic Sequence
tcgcaggacg

SEQ ID NO: 8756 - DNA, 10 bp, Artificial Sequence
  Synthetic Sequence
cttagaggcc

SEQ ID NO: 8757 - DNA, 10 bp, Artificial Sequence
  Synthetic Sequence
gaagcaatag

SEQ ID NO: 8758 - DNA, 10 bp, Artificial Sequence
  Synthetic Sequence
actacgtcgg

SEQ ID NO: 8759 - DNA, 10 bp, Artificial Sequence
  Synthetic Sequence
acacgtcaga

SEQ ID NO: 8760 - DNA, 10 bp, Artificial Sequence
  Synthetic Sequence
cacgataaca

SEQ ID NO: 8761 - DNA, 10 bp, Artificial Sequence
  Synthetic Sequence
tatcaaagat

SEQ ID NO: 8762 - DNA, 10 bp, Artificial Sequence
  Synthetic Sequence
cagccctaat

SEQ ID NO: 8763 - DNA, 10 bp, Artificial Sequence
  Synthetic Sequence
ccgtatcgga

SEQ ID NO: 8764 - DNA, 10 bp, Artificial Sequence
  Synthetic Sequence
ccgcctatca

SEQ ID NO: 8765 - DNA, 10 bp, Artificial Sequence
  Synthetic Sequence
ggcaattcgt

SEQ ID NO: 8766 - DNA, 10 bp, Artificial Sequence
  Synthetic Sequence
tgtctctcag

SEQ ID NO: 8767 - DNA, 10 bp, Artificial Sequence
  Synthetic Sequence
tagactgtca

SEQ ID NO: 8768 - DNA, 10 bp, Artificial Sequence
  Synthetic Sequence
cgagtatcta

SEQ ID NO: 8769 - DNA, 10 bp, Artificial Sequence
  Synthetic Sequence
cgcatctcca

SEQ ID NO: 8770 - DNA, 10 bp, Artificial Sequence
  Synthetic Sequence
ctgtacaggc

SEQ ID NO: 8771 - DNA, 10 bp, Artificial Sequence
  Synthetic Sequence
aaacctacag

SEQ ID NO: 8772 - DNA, 10 bp, Artificial Sequence
  Synthetic Sequence
ttgatgtctt

SEQ ID NO: 8773 - DNA, 10 bp, Artificial Sequence
  Synthetic Sequence
tagcggcgaa

SEQ ID NO: 8774 - DNA, 10 bp, Artificial Sequence
  Synthetic Sequence
cgagccataa

SEQ ID NO: 8775 - DNA, 10 bp, Artificial Sequence
  Synthetic Sequence
ccacgattct

SEQ ID NO: 8776 - DNA, 10 bp, Artificial Sequence
  Synthetic Sequence
cgtcggatgt

SEQ ID NO: 8777 - DNA, 10 bp, Artificial Sequence
  Synthetic Sequence
ccgggtacca

SEQ ID NO: 8778 - DNA, 10 bp, Artificial Sequence
  Synthetic Sequence
ctgggagtca

SEQ ID NO: 8779 - DNA, 10 bp, Artificial Sequence
  Synthetic Sequence
tcagcacttc

SEQ ID NO: 8780 - DNA, 10 bp, Artificial Sequence
  Synthetic Sequence
tgccctcgat

SEQ ID NO: 8781 - DNA, 10 bp, Artificial Sequence
  Synthetic Sequence
gtgagagccg

SEQ ID NO: 8782 - DNA, 10 bp, Artificial Sequence
  Synthetic Sequence
gtggacctaa

SEQ ID NO: 8783 - DNA, 10 bp, Artificial Sequence
  Synthetic Sequence
acgtgggcac

SEQ ID NO: 8784 - DNA, 10 bp, Artificial Sequence
  Synthetic Sequence
acccaaatgc

SEQ ID NO: 8785 - DNA, 10 bp, Artificial Sequence
  Synthetic Sequence
ccgtacatca

SEQ ID NO: 8786 - DNA, 10 bp, Artificial Sequence
  Synthetic Sequence
ggaagatgtg

SEQ ID NO: 8787 - DNA, 10 bp, Artificial Sequence
  Synthetic Sequence
aggccattca

SEQ ID NO: 8788 - DNA, 10 bp, Artificial Sequence
  Synthetic Sequence
cgatacagaa

SEQ ID NO: 8789 - DNA, 10 bp, Artificial Sequence
  Synthetic Sequence
ggatatatgt

SEQ ID NO: 8790 - DNA, 10 bp, Artificial Sequence
  Synthetic Sequence
gttgcaatta

SEQ ID NO: 8791 - DNA, 10 bp, Artificial Sequence
  Synthetic Sequence
tacaattcaa

SEQ ID NO: 8792 - DNA, 10 bp, Artificial Sequence
  Synthetic Sequence
acatgtttga

SEQ ID NO: 8793 - DNA, 10 bp, Artificial Sequence
  Synthetic Sequence
cacgcgagat

SEQ ID NO: 8794 - DNA, 10 bp, Artificial Sequence
  Synthetic Sequence
tgctttgccc

SEQ ID NO: 8795 - DNA, 10 bp, Artificial Sequence
  Synthetic Sequence
agaaatctta

SEQ ID NO: 8796 - DNA, 10 bp, Artificial Sequence
  Synthetic Sequence
ggcatagtcg

SEQ ID NO: 8797 - DNA, 10 bp, Artificial Sequence
  Synthetic Sequence
gtagtttaca

SEQ ID NO: 8798 - DNA, 10 bp, Artificial Sequence
  Synthetic Sequence
aacagaaaga

SEQ ID NO: 8799 - DNA, 10 bp, Artificial Sequence
  Synthetic Sequence
tggtgggtgt

SEQ ID NO: 8800 - DNA, 10 bp, Artificial Sequence
  Synthetic Sequence
catcgttctt

SEQ ID NO: 8801 - DNA, 10 bp, Artificial Sequence
  Synthetic Sequence
aaagatactg

SEQ ID NO: 8802 - DNA, 10 bp, Artificial Sequence
  Synthetic Sequence
actcggactg

SEQ ID NO: 8803 - DNA, 10 bp, Artificial Sequence
  Synthetic Sequence
aatcaatcgg

SEQ ID NO: 8804 - DNA, 10 bp, Artificial Sequence
  Synthetic Sequence
gctgggtagc

SEQ ID NO: 8805 - DNA, 10 bp, Artificial Sequence
  Synthetic Sequence
agtaagccgc

SEQ ID NO: 8806 - DNA, 10 bp, Artificial Sequence
  Synthetic Sequence
ccaacgctcc

SEQ ID NO: 8807 - DNA, 10 bp, Artificial Sequence
  Synthetic Sequence
atccgattct

SEQ ID NO: 8808 - DNA, 10 bp, Artificial Sequence
  Synthetic Sequence
gttacgtttg

SEQ ID NO: 8809 - DNA, 10 bp, Artificial Sequence
  Synthetic Sequence
ggctctggac

SEQ ID NO: 8810 - DNA, 10 bp, Artificial Sequence
  Synthetic Sequence
ggccagtgac

SEQ ID NO: 8811 - DNA, 10 bp, Artificial Sequence
  Synthetic Sequence
ctaatatagc

SEQ ID NO: 8812 - DNA, 10 bp, Artificial Sequence
  Synthetic Sequence
ccatgttggt

SEQ ID NO: 8813 - DNA, 10 bp, Artificial Sequence
  Synthetic Sequence
agcaagcagg

SEQ ID NO: 8814 - DNA, 10 bp, Artificial Sequence
  Synthetic Sequence
tgcgatccag

SEQ ID NO: 8815 - DNA, 10 bp, Artificial Sequence
  Synthetic Sequence
catgccgtcg

SEQ ID NO: 8816 - DNA, 10 bp, Artificial Sequence
  Synthetic Sequence
tagacccaaa

SEQ ID NO: 8817 - DNA, 10 bp, Artificial Sequence
  Synthetic Sequence
tcgctcctcg

SEQ ID NO: 8818 - DNA, 10 bp, Artificial Sequence
  Synthetic Sequence
cagaagccac

SEQ ID NO: 8819 - DNA, 10 bp, Artificial Sequence
  Synthetic Sequence
ggtgcgtgaa

SEQ ID NO: 8820 - DNA, 10 bp, Artificial Sequence
  Synthetic Sequence
tgtccgcagt

SEQ ID NO: 8821 - DNA, 10 bp, Artificial Sequence
  Synthetic Sequence
acggtgcact

SEQ ID NO: 8822 - DNA, 10 bp, Artificial Sequence
  Synthetic Sequence
cagtcctata

SEQ ID NO: 8823 - DNA, 10 bp, Artificial Sequence
  Synthetic Sequence
ccagatgcaa

SEQ ID NO: 8824 - DNA, 10 bp, Artificial Sequence
  Synthetic Sequence
tctttgagtg

SEQ ID NO: 8825 - DNA, 10 bp, Artificial Sequence
  Synthetic Sequence
ggaagtgctc

SEQ ID NO: 8826 - DNA, 10 bp, Artificial Sequence
  Synthetic Sequence
ctatatgtgc

SEQ ID NO: 8827 - DNA, 10 bp, Artificial Sequence
  Synthetic Sequence
aactgggaca

SEQ ID NO: 8828 - DNA, 10 bp, Artificial Sequence
  Synthetic Sequence
tcgaacccga

SEQ ID NO: 8829 - DNA, 10 bp, Artificial Sequence
  Synthetic Sequence
tgggctcatg

SEQ ID NO: 8830 - DNA, 10 bp, Artificial Sequence
  Synthetic Sequence
tacgcagaac

SEQ ID NO: 8831 - DNA, 10 bp, Artificial Sequence
  Synthetic Sequence
gacacatcgg

SEQ ID NO: 8832 - DNA, 10 bp, Artificial Sequence
  Synthetic Sequence
caccaatagg

SEQ ID NO: 8833 - DNA, 10 bp, Artificial Sequence
  Synthetic Sequence
aacaccctgg

SEQ ID NO: 8834 - DNA, 10 bp, Artificial Sequence
  Synthetic Sequence
aaaggtttag

SEQ ID NO: 8835 - DNA, 10 bp, Artificial Sequence
  Synthetic Sequence
tgatcagtgc

SEQ ID NO: 8836 - DNA, 10 bp, Artificial Sequence
  Synthetic Sequence
tgcaccgagc

SEQ ID NO: 8837 - DNA, 10 bp, Artificial Sequence
  Synthetic Sequence
tacaagacga

SEQ ID NO: 8838 - DNA, 10 bp, Artificial Sequence
  Synthetic Sequence
aatggcggga

SEQ ID NO: 8839 - DNA, 10 bp, Artificial Sequence
  Synthetic Sequence
atcgtctcca

SEQ ID NO: 8840 - DNA, 10 bp, Artificial Sequence
  Synthetic Sequence
tatcgcaaac

SEQ ID NO: 8841 - DNA, 10 bp, Artificial Sequence
  Synthetic Sequence
cacgcagatg

SEQ ID NO: 8842 - DNA, 10 bp, Artificial Sequence
  Synthetic Sequence
gggagtgtac

SEQ ID NO: 8843 - DNA, 10 bp, Artificial Sequence
  Synthetic Sequence
acgcgacgta

SEQ ID NO: 8844 - DNA, 10 bp, Artificial Sequence
  Synthetic Sequence
gtggtggata

SEQ ID NO: 8845 - DNA, 10 bp, Artificial Sequence
  Synthetic Sequence
ctactaatct

SEQ ID NO: 8846 - DNA, 10 bp, Artificial Sequence
  Synthetic Sequence
ataacgatgg

SEQ ID NO: 8847 - DNA, 10 bp, Artificial Sequence
  Synthetic Sequence
ttgtccatac

SEQ ID NO: 8848 - DNA, 10 bp, Artificial Sequence
  Synthetic Sequence
attcccatac

SEQ ID NO: 8849 - DNA, 10 bp, Artificial Sequence
  Synthetic Sequence
catcaagtat

SEQ ID NO: 8850 - DNA, 10 bp, Artificial Sequence
  Synthetic Sequence
aaacgctgaa

SEQ ID NO: 8851 - DNA, 10 bp, Artificial Sequence
  Synthetic Sequence
gtaacgcggg

SEQ ID NO: 8852 - DNA, 10 bp, Artificial Sequence
  Synthetic Sequence
tagggcgtcc

SEQ ID NO: 8853 - DNA, 10 bp, Artificial Sequence
  Synthetic Sequence
gtgtctaagt

SEQ ID NO: 8854 - DNA, 10 bp, Artificial Sequence
  Synthetic Sequence
gctgttcgcg

SEQ ID NO: 8855 - DNA, 10 bp, Artificial Sequence
  Synthetic Sequence
caagccgctg

SEQ ID NO: 8856 - DNA, 10 bp, Artificial Sequence
  Synthetic Sequence
gagacaggat

SEQ ID NO: 8857 - DNA, 10 bp, Artificial Sequence
  Synthetic Sequence
ttaacgggac

SEQ ID NO: 8858 - DNA, 10 bp, Artificial Sequence
  Synthetic Sequence
cgccgaaact

SEQ ID NO: 8859 - DNA, 10 bp, Artificial Sequence
  Synthetic Sequence
ttcgtagaag

SEQ ID NO: 8860 - DNA, 10 bp, Artificial Sequence
  Synthetic Sequence
catttcgtca

SEQ ID NO: 8861 - DNA, 10 bp, Artificial Sequence
  Synthetic Sequence
agcgatgaaa

SEQ ID NO: 8862 - DNA, 10 bp, Artificial Sequence
  Synthetic Sequence
ccctttgcga

SEQ ID NO: 8863 - DNA, 10 bp, Artificial Sequence
  Synthetic Sequence
gtgcaccgac

SEQ ID NO: 8864 - DNA, 10 bp, Artificial Sequence
  Synthetic Sequence
gtcttgagga

SEQ ID NO: 8865 - DNA, 10 bp, Artificial Sequence
  Synthetic Sequence
acttccgcca

SEQ ID NO: 8866 - DNA, 10 bp, Artificial Sequence
  Synthetic Sequence
cgcgtccaag

SEQ ID NO: 8867 - DNA, 10 bp, Artificial Sequence
  Synthetic Sequence
ggctctacca

SEQ ID NO: 8868 - DNA, 10 bp, Artificial Sequence
  Synthetic Sequence
tagctgagcg

SEQ ID NO: 8869 - DNA, 10 bp, Artificial Sequence
  Synthetic Sequence
gtctatggat

SEQ ID NO: 8870 - DNA, 10 bp, Artificial Sequence
  Synthetic Sequence
ctccttgtac

SEQ ID NO: 8871 - DNA, 10 bp, Artificial Sequence
  Synthetic Sequence
tgcgcgctac

SEQ ID NO: 8872 - DNA, 10 bp, Artificial Sequence
  Synthetic Sequence
tgtccgcgaa

SEQ ID NO: 8873 - DNA, 10 bp, Artificial Sequence
  Synthetic Sequence
cagtttattc

SEQ ID NO: 8874 - DNA, 10 bp, Artificial Sequence
  Synthetic Sequence
cctattcatc

SEQ ID NO: 8875 - DNA, 10 bp, Artificial Sequence
  Synthetic Sequence
gagttatgct

SEQ ID NO: 8876 - DNA, 10 bp, Artificial Sequence
  Synthetic Sequence
ggactgccct

SEQ ID NO: 8877 - DNA, 10 bp, Artificial Sequence
  Synthetic Sequence
ggtaaagcct

SEQ ID NO: 8878 - DNA, 10 bp, Artificial Sequence
  Synthetic Sequence
aacaccatta

SEQ ID NO: 8879 - DNA, 10 bp, Artificial Sequence
  Synthetic Sequence
attactcata

SEQ ID NO: 8880 - DNA, 10 bp, Artificial Sequence
  Synthetic Sequence
ggaaataaca

SEQ ID NO: 8881 - DNA, 10 bp, Artificial Sequence
  Synthetic Sequence
ataccttcta

SEQ ID NO: 8882 - DNA, 10 bp, Artificial Sequence
  Synthetic Sequence
cggtcgtaac

SEQ ID NO: 8883 - DNA, 10 bp, Artificial Sequence
  Synthetic Sequence
gaggtctcgc

SEQ ID NO: 8884 - DNA, 10 bp, Artificial Sequence
  Synthetic Sequence
aacatgtctt

SEQ ID NO: 8885 - DNA, 10 bp, Artificial Sequence
  Synthetic Sequence
tctaaatttc

SEQ ID NO: 8886 - DNA, 10 bp, Artificial Sequence
  Synthetic Sequence
tgctacttct

SEQ ID NO: 8887 - DNA, 10 bp, Artificial Sequence
  Synthetic Sequence
gtctaatggg

SEQ ID NO: 8888 - DNA, 10 bp, Artificial Sequence
  Synthetic Sequence
tgtatgctgt

SEQ ID NO: 8889 - DNA, 10 bp, Artificial Sequence
  Synthetic Sequence
cagcgcagat

SEQ ID NO: 8890 - DNA, 10 bp, Artificial Sequence
  Synthetic Sequence
actctcagaa

SEQ ID NO: 8891 - DNA, 10 bp, Artificial Sequence
  Synthetic Sequence
agaggaccag

SEQ ID NO: 8892 - DNA, 10 bp, Artificial Sequence
  Synthetic Sequence
aatggacaaa

SEQ ID NO: 8893 - DNA, 10 bp, Artificial Sequence
  Synthetic Sequence
ccttgagcgc

SEQ ID NO: 8894 - DNA, 10 bp, Artificial Sequence
  Synthetic Sequence
acccgtcgag

SEQ ID NO: 8895 - DNA, 10 bp, Artificial Sequence
  Synthetic Sequence
tagtatgtgg

SEQ ID NO: 8896 - DNA, 10 bp, Artificial Sequence
  Synthetic Sequence
ggtgcgattg

SEQ ID NO: 8897 - DNA, 10 bp, Artificial Sequence
  Synthetic Sequence
tttgcagtaa

SEQ ID NO: 8898 - DNA, 10 bp, Artificial Sequence
  Synthetic Sequence
gccgtaacgg

SEQ ID NO: 8899 - DNA, 10 bp, Artificial Sequence
  Synthetic Sequence
ataatataaa

SEQ ID NO: 8900 - DNA, 10 bp, Artificial Sequence
  Synthetic Sequence
cgaccaaggt

SEQ ID NO: 8901 - DNA, 10 bp, Artificial Sequence
  Synthetic Sequence
tcatattctc

SEQ ID NO: 8902 - DNA, 10 bp, Artificial Sequence
  Synthetic Sequence
tcatgtcaag

SEQ ID NO: 8903 - DNA, 10 bp, Artificial Sequence
  Synthetic Sequence
tggaatgatg

SEQ ID NO: 8904 - DNA, 10 bp, Artificial Sequence
  Synthetic Sequence
cattcacgaa

SEQ ID NO: 8905 - DNA, 10 bp, Artificial Sequence
  Synthetic Sequence
gaagtagcag

SEQ ID NO: 8906 - DNA, 10 bp, Artificial Sequence
  Synthetic Sequence
ttgaggatcc

SEQ ID NO: 8907 - DNA, 10 bp, Artificial Sequence
  Synthetic Sequence
ccttgctggg

SEQ ID NO: 8908 - DNA, 10 bp, Artificial Sequence
  Synthetic Sequence
ctcaaccggt

SEQ ID NO: 8909 - DNA, 10 bp, Artificial Sequence
  Synthetic Sequence
tgtatagcag

SEQ ID NO: 8910 - DNA, 10 bp, Artificial Sequence
  Synthetic Sequence
cacattgagg

SEQ ID NO: 8911 - DNA, 10 bp, Artificial Sequence
  Synthetic Sequence
agcaattaca

SEQ ID NO: 8912 - DNA, 10 bp, Artificial Sequence
  Synthetic Sequence
tctagcggct

SEQ ID NO: 8913 - DNA, 10 bp, Artificial Sequence
  Synthetic Sequence
gaatgactgc

SEQ ID NO: 8914 - DNA, 10 bp, Artificial Sequence
  Synthetic Sequence
aacgatcctc

SEQ ID NO: 8915 - DNA, 10 bp, Artificial Sequence
  Synthetic Sequence
tacgtggata

SEQ ID NO: 8916 - DNA, 10 bp, Artificial Sequence
  Synthetic Sequence
tatctctacg

SEQ ID NO: 8917 - DNA, 10 bp, Artificial Sequence
  Synthetic Sequence
gccgggatgt

SEQ ID NO: 8918 - DNA, 10 bp, Artificial Sequence
  Synthetic Sequence
gacctcattc

SEQ ID NO: 8919 - DNA, 10 bp, Artificial Sequence
  Synthetic Sequence
ccagcgcttt

SEQ ID NO: 8920 - DNA, 10 bp, Artificial Sequence
  Synthetic Sequence
cgacttggtt

SEQ ID NO: 8921 - DNA, 10 bp, Artificial Sequence
  Synthetic Sequence
tgatctaggt

SEQ ID NO: 8922 - DNA, 10 bp, Artificial Sequence
  Synthetic Sequence
tacgtcgggc

SEQ ID NO: 8923 - DNA, 10 bp, Artificial Sequence
  Synthetic Sequence
cccgacccaa

SEQ ID NO: 8924 - DNA, 10 bp, Artificial Sequence
  Synthetic Sequence
gcctggttct

SEQ ID NO: 8925 - DNA, 10 bp, Artificial Sequence
  Synthetic Sequence
acatccagtc

SEQ ID NO: 8926 - DNA, 10 bp, Artificial Sequence
  Synthetic Sequence
tctccgacta

SEQ ID NO: 8927 - DNA, 10 bp, Artificial Sequence
  Synthetic Sequence
catttacacg

SEQ ID NO: 8928 - DNA, 10 bp, Artificial Sequence
  Synthetic Sequence
tctttatagt

SEQ ID NO: 8929 - DNA, 10 bp, Artificial Sequence
  Synthetic Sequence
tatcccgccc

SEQ ID NO: 8930 - DNA, 10 bp, Artificial Sequence
  Synthetic Sequence
agcaacccta

SEQ ID NO: 8931 - DNA, 10 bp, Artificial Sequence
  Synthetic Sequence
ggtcatggaa

SEQ ID NO: 8932 - DNA, 10 bp, Artificial Sequence
  Synthetic Sequence
cctcggctga

SEQ ID NO: 8933 - DNA, 10 bp, Artificial Sequence
  Synthetic Sequence
acttggcgag

SEQ ID NO: 8934 - DNA, 10 bp, Artificial Sequence
  Synthetic Sequence
tcatacgtaa

SEQ ID NO: 8935 - DNA, 10 bp, Artificial Sequence
  Synthetic Sequence
ttatacaccc

SEQ ID NO: 8936 - DNA, 10 bp, Artificial Sequence
  Synthetic Sequence
gtggcaggtc

SEQ ID NO: 8937 - DNA, 10 bp, Artificial Sequence
  Synthetic Sequence
gtccgtcgaa

SEQ ID NO: 8938 - DNA, 10 bp, Artificial Sequence
  Synthetic Sequence
gaggcagaag

SEQ ID NO: 8939 - DNA, 10 bp, Artificial Sequence
  Synthetic Sequence
atatttccac

SEQ ID NO: 8940 - DNA, 10 bp, Artificial Sequence
  Synthetic Sequence
ctagtgaata

SEQ ID NO: 8941 - DNA, 10 bp, Artificial Sequence
  Synthetic Sequence
ctcaaagtgg

SEQ ID NO: 8942 - DNA, 10 bp, Artificial Sequence
  Synthetic Sequence
agggtcagaa

SEQ ID NO: 8943 - DNA, 10 bp, Artificial Sequence
  Synthetic Sequence
gatttgcacc

SEQ ID NO: 8944 - DNA, 10 bp, Artificial Sequence
  Synthetic Sequence
cacaattagc

SEQ ID NO: 8945 - DNA, 10 bp, Artificial Sequence
  Synthetic Sequence
acggtcctaa

SEQ ID NO: 8946 - DNA, 10 bp, Artificial Sequence
  Synthetic Sequence
tcgaaagacc

SEQ ID NO: 8947 - DNA, 10 bp, Artificial Sequence
  Synthetic Sequence
gtaccgtcat

SEQ ID NO: 8948 - DNA, 10 bp, Artificial Sequence
  Synthetic Sequence
gcacaaagtt

SEQ ID NO: 8949 - DNA, 10 bp, Artificial Sequence
  Synthetic Sequence
ccgcatgctc

SEQ ID NO: 8950 - DNA, 10 bp, Artificial Sequence
  Synthetic Sequence
cagacctggt

SEQ ID NO: 8951 - DNA, 10 bp, Artificial Sequence
  Synthetic Sequence
atagagccgc

SEQ ID NO: 8952 - DNA, 10 bp, Artificial Sequence
  Synthetic Sequence
atctgcaccc

SEQ ID NO: 8953 - DNA, 10 bp, Artificial Sequence
  Synthetic Sequence
cgcggatctc

SEQ ID NO: 8954 - DNA, 10 bp, Artificial Sequence
  Synthetic Sequence
gttatggact

SEQ ID NO: 8955 - DNA, 10 bp, Artificial Sequence
  Synthetic Sequence
acgaacacgc

SEQ ID NO: 8956 - DNA, 10 bp, Artificial Sequence
  Synthetic Sequence
gtcaccacat

SEQ ID NO: 8957 - DNA, 10 bp, Artificial Sequence
  Synthetic Sequence
cggtccttct

SEQ ID NO: 8958 - DNA, 10 bp, Artificial Sequence
  Synthetic Sequence
ttgaatctga

SEQ ID NO: 8959 - DNA, 10 bp, Artificial Sequence
  Synthetic Sequence
caccctttcg

SEQ ID NO: 8960 - DNA, 10 bp, Artificial Sequence
  Synthetic Sequence
cgcgtcgcta

SEQ ID NO: 8961 - DNA, 10 bp, Artificial Sequence
  Synthetic Sequence
ataaccctga

SEQ ID NO: 8962 - DNA, 10 bp, Artificial Sequence
  Synthetic Sequence
cgtttatgca

SEQ ID NO: 8963 - DNA, 10 bp, Artificial Sequence
  Synthetic Sequence
aaagcgggag

SEQ ID NO: 8964 - DNA, 10 bp, Artificial Sequence
  Synthetic Sequence
gcatatcggt

SEQ ID NO: 8965 - DNA, 10 bp, Artificial Sequence
  Synthetic Sequence
atcggcggat

SEQ ID NO: 8966 - DNA, 10 bp, Artificial Sequence
  Synthetic Sequence
gattaagttt

SEQ ID NO: 8967 - DNA, 10 bp, Artificial Sequence
  Synthetic Sequence
gaagtttagt

SEQ ID NO: 8968 - DNA, 10 bp, Artificial Sequence
  Synthetic Sequence
taggcattat

SEQ ID NO: 8969 - DNA, 10 bp, Artificial Sequence
  Synthetic Sequence
tctctggagt

SEQ ID NO: 8970 - DNA, 10 bp, Artificial Sequence
  Synthetic Sequence
ctactagcta

SEQ ID NO: 8971 - DNA, 10 bp, Artificial Sequence
  Synthetic Sequence
atatgctatg

SEQ ID NO: 8972 - DNA, 10 bp, Artificial Sequence
  Synthetic Sequence
gtgtgttccc

SEQ ID NO: 8973 - DNA, 10 bp, Artificial Sequence
  Synthetic Sequence
gttagatgca

SEQ ID NO: 8974 - DNA, 10 bp, Artificial Sequence
  Synthetic Sequence
tctgagttag

SEQ ID NO: 8975 - DNA, 10 bp, Artificial Sequence
  Synthetic Sequence
tactagcgat

SEQ ID NO: 8976 - DNA, 10 bp, Artificial Sequence
  Synthetic Sequence
gggagttcag

SEQ ID NO: 8977 - DNA, 10 bp, Artificial Sequence
  Synthetic Sequence
tacacccacg

SEQ ID NO: 8978 - DNA, 10 bp, Artificial Sequence
  Synthetic Sequence
tttcgtgtat

SEQ ID NO: 8979 - DNA, 10 bp, Artificial Sequence
  Synthetic Sequence
aaatgtaata

SEQ ID NO: 8980 - DNA, 10 bp, Artificial Sequence
  Synthetic Sequence
cgctagcaag

SEQ ID NO: 8981 - DNA, 10 bp, Artificial Sequence
  Synthetic Sequence
atagtatttc

SEQ ID NO: 8982 - DNA, 10 bp, Artificial Sequence
  Synthetic Sequence
acgtatattg

SEQ ID NO: 8983 - DNA, 10 bp, Artificial Sequence
  Synthetic Sequence
aagcccgcgt

SEQ ID NO: 8984 - DNA, 10 bp, Artificial Sequence
  Synthetic Sequence
ggactaccgg

SEQ ID NO: 8985 - DNA, 10 bp, Artificial Sequence
  Synthetic Sequence
tttgtatgct

SEQ ID NO: 8986 - DNA, 10 bp, Artificial Sequence
  Synthetic Sequence
atgtagtcac

SEQ ID NO: 8987 - DNA, 10 bp, Artificial Sequence
  Synthetic Sequence
ttatgggtat

SEQ ID NO: 8988 - DNA, 10 bp, Artificial Sequence
  Synthetic Sequence
cgggtagttg

SEQ ID NO: 8989 - DNA, 10 bp, Artificial Sequence
  Synthetic Sequence
ctccgacacg

SEQ ID NO: 8990 - DNA, 10 bp, Artificial Sequence
  Synthetic Sequence
tcggcaggac

SEQ ID NO: 8991 - DNA, 10 bp, Artificial Sequence
  Synthetic Sequence
ctatagccgt

SEQ ID NO: 8992 - DNA, 10 bp, Artificial Sequence
  Synthetic Sequence
aaatgcggag

SEQ ID NO: 8993 - DNA, 10 bp, Artificial Sequence
  Synthetic Sequence
taaagttgtc

SEQ ID NO: 8994 - DNA, 10 bp, Artificial Sequence
  Synthetic Sequence
gtcatatcgt

SEQ ID NO: 8995 - DNA, 10 bp, Artificial Sequence
  Synthetic Sequence
gaccatgagg

SEQ ID NO: 8996 - DNA, 10 bp, Artificial Sequence
  Synthetic Sequence
aggttactta

SEQ ID NO: 8997 - DNA, 10 bp, Artificial Sequence
  Synthetic Sequence
acagtctgtg

SEQ ID NO: 8998 - DNA, 10 bp, Artificial Sequence
  Synthetic Sequence
accatactcc

SEQ ID NO: 8999 - DNA, 10 bp, Artificial Sequence
  Synthetic Sequence
ctagatccga

SEQ ID NO: 9000 - DNA, 10 bp, Artificial Sequence
  Synthetic Sequence
tcttgaccgt

SEQ ID NO: 9001 - DNA, 10 bp, Artificial Sequence
  Synthetic Sequence
gagaaatact

SEQ ID NO: 9002 - DNA, 10 bp, Artificial Sequence
  Synthetic Sequence
cgtcccgact

SEQ ID NO: 9003 - DNA, 10 bp, Artificial Sequence
  Synthetic Sequence
tcgcaaagag

SEQ ID NO: 9004 - DNA, 10 bp, Artificial Sequence
  Synthetic Sequence
ttcccttccc

SEQ ID NO: 9005 - DNA, 10 bp, Artificial Sequence
  Synthetic Sequence
atggaggcgt

SEQ ID NO: 9006 - DNA, 10 bp, Artificial Sequence
  Synthetic Sequence
agaggatggt

SEQ ID NO: 9007 - DNA, 10 bp, Artificial Sequence
  Synthetic Sequence
tgcggagtat

SEQ ID NO: 9008 - DNA, 10 bp, Artificial Sequence
  Synthetic Sequence
ctttgggcca

SEQ ID NO: 9009 - DNA, 10 bp, Artificial Sequence
  Synthetic Sequence
gcaattagtc

SEQ ID NO: 9010 - DNA, 10 bp, Artificial Sequence
  Synthetic Sequence
gatactcgac

SEQ ID NO: 9011 - DNA, 10 bp, Artificial Sequence
  Synthetic Sequence
ctgcgaataa

SEQ ID NO: 9012 - DNA, 10 bp, Artificial Sequence
  Synthetic Sequence
agtggaacgc

SEQ ID NO: 9013 - DNA, 10 bp, Artificial Sequence
  Synthetic Sequence
aacattcggc

SEQ ID NO: 9014 - DNA, 10 bp, Artificial Sequence
  Synthetic Sequence
tatgtatggc

SEQ ID NO: 9015 - DNA, 10 bp, Artificial Sequence
  Synthetic Sequence
gaacgagtaa

SEQ ID NO: 9016 - DNA, 10 bp, Artificial Sequence
  Synthetic Sequence
acaccgtatg

SEQ ID NO: 9017 - DNA, 10 bp, Artificial Sequence
  Synthetic Sequence
tttccctttc

SEQ ID NO: 9018 - DNA, 10 bp, Artificial Sequence
  Synthetic Sequence
cgcacagcga

SEQ ID NO: 9019 - DNA, 10 bp, Artificial Sequence
  Synthetic Sequence
ttgccctcgt

SEQ ID NO: 9020 - DNA, 10 bp, Artificial Sequence
  Synthetic Sequence
atccaaagct

SEQ ID NO: 9021 - DNA, 10 bp, Artificial Sequence
  Synthetic Sequence
gggtacatga

SEQ ID NO: 9022 - DNA, 10 bp, Artificial Sequence
  Synthetic Sequence
atacctatat

SEQ ID NO: 9023 - DNA, 10 bp, Artificial Sequence
  Synthetic Sequence
gtctaactcc

SEQ ID NO: 9024 - DNA, 10 bp, Artificial Sequence
  Synthetic Sequence
gccaagattg

SEQ ID NO: 9025 - DNA, 10 bp, Artificial Sequence
  Synthetic Sequence
tgcttgttcc

SEQ ID NO: 9026 - DNA, 10 bp, Artificial Sequence
  Synthetic Sequence
agctaacatc

SEQ ID NO: 9027 - DNA, 10 bp, Artificial Sequence
  Synthetic Sequence
ccacatagtg

SEQ ID NO: 9028 - DNA, 10 bp, Artificial Sequence
  Synthetic Sequence
gtctcggaat

SEQ ID NO: 9029 - DNA, 10 bp, Artificial Sequence
  Synthetic Sequence
aggctatgtg

SEQ ID NO: 9030 - DNA, 10 bp, Artificial Sequence
  Synthetic Sequence
gaatgtggtg

SEQ ID NO: 9031 - DNA, 10 bp, Artificial Sequence
  Synthetic Sequence
gctaggttac

SEQ ID NO: 9032 - DNA, 10 bp, Artificial Sequence
  Synthetic Sequence
atgagctaat

SEQ ID NO: 9033 - DNA, 10 bp, Artificial Sequence
  Synthetic Sequence
gcgtaacttg

SEQ ID NO: 9034 - DNA, 10 bp, Artificial Sequence
  Synthetic Sequence
cagaaattat

SEQ ID NO: 9035 - DNA, 10 bp, Artificial Sequence
  Synthetic Sequence
ccatctacaa

SEQ ID NO: 9036 - DNA, 10 bp, Artificial Sequence
  Synthetic Sequence
gccttatttc

SEQ ID NO: 9037 - DNA, 10 bp, Artificial Sequence
  Synthetic Sequence
caggccagca

SEQ ID NO: 9038 - DNA, 10 bp, Artificial Sequence
  Synthetic Sequence
acttacataa

SEQ ID NO: 9039 - DNA, 10 bp, Artificial Sequence
  Synthetic Sequence
catgggtgtg

SEQ ID NO: 9040 - DNA, 10 bp, Artificial Sequence
  Synthetic Sequence
actcgggaag

SEQ ID NO: 9041 - DNA, 10 bp, Artificial Sequence
  Synthetic Sequence
attggcgagc

SEQ ID NO: 9042 - DNA, 10 bp, Artificial Sequence
  Synthetic Sequence
taattcgtag

SEQ ID NO: 9043 - DNA, 10 bp, Artificial Sequence
  Synthetic Sequence
caatcatggt

SEQ ID NO: 9044 - DNA, 10 bp, Artificial Sequence
  Synthetic Sequence
acgttcttag

SEQ ID NO: 9045 - DNA, 10 bp, Artificial Sequence
  Synthetic Sequence
tagcttccgg

SEQ ID NO: 9046 - DNA, 10 bp, Artificial Sequence
  Synthetic Sequence
agaacatgtt

SEQ ID NO: 9047 - DNA, 10 bp, Artificial Sequence
  Synthetic Sequence
gacttccgcg

SEQ ID NO: 9048 - DNA, 10 bp, Artificial Sequence
  Synthetic Sequence
tcctcgccca

SEQ ID NO: 9049 - DNA, 10 bp, Artificial Sequence
  Synthetic Sequence
tcgcatccct

SEQ ID NO: 9050 - DNA, 10 bp, Artificial Sequence
  Synthetic Sequence
acctctccat

SEQ ID NO: 9051 - DNA, 10 bp, Artificial Sequence
  Synthetic Sequence
tcataacagt

SEQ ID NO: 9052 - DNA, 10 bp, Artificial Sequence
  Synthetic Sequence
ataagagata

SEQ ID NO: 9053 - DNA, 10 bp, Artificial Sequence
  Synthetic Sequence
agcgggaata

SEQ ID NO: 9054 - DNA, 10 bp, Artificial Sequence
  Synthetic Sequence
caataggtag

SEQ ID NO: 9055 - DNA, 10 bp, Artificial Sequence
  Synthetic Sequence
acttcgggtg

SEQ ID NO: 9056 - DNA, 10 bp, Artificial Sequence
  Synthetic Sequence
tgatgactgg

SEQ ID NO: 9057 - DNA, 10 bp, Artificial Sequence
  Synthetic Sequence
acgtacggtt

SEQ ID NO: 9058 - DNA, 10 bp, Artificial Sequence
  Synthetic Sequence
gtccgtaatt

SEQ ID NO: 9059 - DNA, 10 bp, Artificial Sequence
  Synthetic Sequence
aaccacacgt

SEQ ID NO: 9060 - DNA, 10 bp, Artificial Sequence
  Synthetic Sequence
cactccatgt

SEQ ID NO: 9061 - DNA, 10 bp, Artificial Sequence
  Synthetic Sequence
atacacaact

SEQ ID NO: 9062 - DNA, 10 bp, Artificial Sequence
  Synthetic Sequence
actagtccgc

SEQ ID NO: 9063 - DNA, 10 bp, Artificial Sequence
  Synthetic Sequence
cgccctggta

SEQ ID NO: 9064 - DNA, 10 bp, Artificial Sequence
  Synthetic Sequence
ccgtgaaccg

SEQ ID NO: 9065 - DNA, 10 bp, Artificial Sequence
  Synthetic Sequence
atgttgggta

SEQ ID NO: 9066 - DNA, 10 bp, Artificial Sequence
  Synthetic Sequence
ccggaacgct

SEQ ID NO: 9067 - DNA, 10 bp, Artificial Sequence
  Synthetic Sequence
tcctgatcaa

SEQ ID NO: 9068 - DNA, 10 bp, Artificial Sequence
  Synthetic Sequence
gtccgatctg

SEQ ID NO: 9069 - DNA, 10 bp, Artificial Sequence
  Synthetic Sequence
gttatgatga

SEQ ID NO: 9070 - DNA, 10 bp, Artificial Sequence
  Synthetic Sequence
tgtccgatgc

SEQ ID NO: 9071 - DNA, 10 bp, Artificial Sequence
  Synthetic Sequence
cgggtgcctt

SEQ ID NO: 9072 - DNA, 10 bp, Artificial Sequence
  Synthetic Sequence
gtcaacagca

SEQ ID NO: 9073 - DNA, 10 bp, Artificial Sequence
  Synthetic Sequence
gtcctgcgtc

SEQ ID NO: 9074 - DNA, 10 bp, Artificial Sequence
  Synthetic Sequence
tgggtagaac

SEQ ID NO: 9075 - DNA, 10 bp, Artificial Sequence
  Synthetic Sequence
gtccagctca

SEQ ID NO: 9076 - DNA, 10 bp, Artificial Sequence
  Synthetic Sequence
ggctcaaatg

SEQ ID NO: 9077 - DNA, 10 bp, Artificial Sequence
  Synthetic Sequence
atcatacata

SEQ ID NO: 9078 - DNA, 10 bp, Artificial Sequence
  Synthetic Sequence
ccaaagacga

SEQ ID NO: 9079 - DNA, 10 bp, Artificial Sequence
  Synthetic Sequence
tttcgaacca

SEQ ID NO: 9080 - DNA, 10 bp, Artificial Sequence
  Synthetic Sequence
aacaccgagt

SEQ ID NO: 9081 - DNA, 10 bp, Artificial Sequence
  Synthetic Sequence
gctacacgca

SEQ ID NO: 9082 - DNA, 10 bp, Artificial Sequence
  Synthetic Sequence
caaacattcc

SEQ ID NO: 9083 - DNA, 10 bp, Artificial Sequence
  Synthetic Sequence
tcggcctgga

SEQ ID NO: 9084 - DNA, 10 bp, Artificial Sequence
  Synthetic Sequence
aggctcgatg

SEQ ID NO: 9085 - DNA, 10 bp, Artificial Sequence
  Synthetic Sequence
atgttgtaga

SEQ ID NO: 9086 - DNA, 10 bp, Artificial Sequence
  Synthetic Sequence
ttctaacgtg

SEQ ID NO: 9087 - DNA, 10 bp, Artificial Sequence
  Synthetic Sequence
aaactggtcc

SEQ ID NO: 9088 - DNA, 10 bp, Artificial Sequence
  Synthetic Sequence
ccgaggaatg

SEQ ID NO: 9089 - DNA, 10 bp, Artificial Sequence
  Synthetic Sequence
ttatgttcca

SEQ ID NO: 9090 - DNA, 10 bp, Artificial Sequence
  Synthetic Sequence
ccaagagcaa

SEQ ID NO: 9091 - DNA, 10 bp, Artificial Sequence
  Synthetic Sequence
aattgattat

SEQ ID NO: 9092 - DNA, 10 bp, Artificial Sequence
  Synthetic Sequence
tcaggtatat

SEQ ID NO: 9093 - DNA, 10 bp, Artificial Sequence
  Synthetic Sequence
cttgaggccc

SEQ ID NO: 9094 - DNA, 10 bp, Artificial Sequence
  Synthetic Sequence
gaaacaaagg

SEQ ID NO: 9095 - DNA, 10 bp, Artificial Sequence
  Synthetic Sequence
cggacagtct

SEQ ID NO: 9096 - DNA, 10 bp, Artificial Sequence
  Synthetic Sequence
tcggtaaggt

SEQ ID NO: 9097 - DNA, 10 bp, Artificial Sequence
  Synthetic Sequence
tgggaaacat

SEQ ID NO: 9098 - DNA, 10 bp, Artificial Sequence
  Synthetic Sequence
ggctaaggcc

SEQ ID NO: 9099 - DNA, 10 bp, Artificial Sequence
  Synthetic Sequence
atcgtgctcc

SEQ ID NO: 9100 - DNA, 10 bp, Artificial Sequence
  Synthetic Sequence
tcatctaaga

SEQ ID NO: 9101 - DNA, 10 bp, Artificial Sequence
  Synthetic Sequence
cgtcgacagt

SEQ ID NO: 9102 - DNA, 10 bp, Artificial Sequence
  Synthetic Sequence
agaatcaagc

SEQ ID NO: 9103 - DNA, 10 bp, Artificial Sequence
  Synthetic Sequence
acctgcctga

SEQ ID NO: 9104 - DNA, 10 bp, Artificial Sequence
  Synthetic Sequence
tctcctgtcg

SEQ ID NO: 9105 - DNA, 10 bp, Artificial Sequence
  Synthetic Sequence
gtttcctgta

SEQ ID NO: 9106 - DNA, 10 bp, Artificial Sequence
  Synthetic Sequence
atcgtcgcgt

SEQ ID NO: 9107 - DNA, 10 bp, Artificial Sequence
  Synthetic Sequence
cagaggatgt

SEQ ID NO: 9108 - DNA, 10 bp, Artificial Sequence
  Synthetic Sequence
acacgccgca

SEQ ID NO: 9109 - DNA, 10 bp, Artificial Sequence
  Synthetic Sequence
atccggcagg

SEQ ID NO: 9110 - DNA, 10 bp, Artificial Sequence
  Synthetic Sequence
ttgtcgactt

SEQ ID NO: 9111 - DNA, 10 bp, Artificial Sequence
  Synthetic Sequence
gaaactgtga

SEQ ID NO: 9112 - DNA, 10 bp, Artificial Sequence
  Synthetic Sequence
cgcatacagg

SEQ ID NO: 9113 - DNA, 10 bp, Artificial Sequence
  Synthetic Sequence
tcgggtcatt

SEQ ID NO: 9114 - DNA, 10 bp, Artificial Sequence
  Synthetic Sequence
ctgggctcca

SEQ ID NO: 9115 - DNA, 10 bp, Artificial Sequence
  Synthetic Sequence
aagctactga

SEQ ID NO: 9116 - DNA, 10 bp, Artificial Sequence
  Synthetic Sequence
gatccgtctt

SEQ ID NO: 9117 - DNA, 10 bp, Artificial Sequence
  Synthetic Sequence
tgaacgtgcg

SEQ ID NO: 9118 - DNA, 10 bp, Artificial Sequence
  Synthetic Sequence
gttcttacag

SEQ ID NO: 9119 - DNA, 10 bp, Artificial Sequence
  Synthetic Sequence
gatacgataa

SEQ ID NO: 9120 - DNA, 10 bp, Artificial Sequence
  Synthetic Sequence
tcggactagg

SEQ ID NO: 9121 - DNA, 10 bp, Artificial Sequence
  Synthetic Sequence
aaagagtctc

SEQ ID NO: 9122 - DNA, 10 bp, Artificial Sequence
  Synthetic Sequence
gagctccttg

SEQ ID NO: 9123 - DNA, 10 bp, Artificial Sequence
  Synthetic Sequence
aataacacac

SEQ ID NO: 9124 - DNA, 10 bp, Artificial Sequence
  Synthetic Sequence
tagacccgct

SEQ ID NO: 9125 - DNA, 10 bp, Artificial Sequence
  Synthetic Sequence
tcttggtaga

SEQ ID NO: 9126 - DNA, 10 bp, Artificial Sequence
  Synthetic Sequence
gcacggctca

SEQ ID NO: 9127 - DNA, 10 bp, Artificial Sequence
  Synthetic Sequence
aagtaggatg

SEQ ID NO: 9128 - DNA, 10 bp, Artificial Sequence
  Synthetic Sequence
ctcagagatg

SEQ ID NO: 9129 - DNA, 10 bp, Artificial Sequence
  Synthetic Sequence
atacaatatt

SEQ ID NO: 9130 - DNA, 10 bp, Artificial Sequence
  Synthetic Sequence
ggagtaattc

SEQ ID NO: 9131 - DNA, 10 bp, Artificial Sequence
  Synthetic Sequence
cctcatattc

SEQ ID NO: 9132 - DNA, 10 bp, Artificial Sequence
  Synthetic Sequence
gcgtccagct

SEQ ID NO: 9133 - DNA, 10 bp, Artificial Sequence
  Synthetic Sequence
gagataacac

SEQ ID NO: 9134 - DNA, 10 bp, Artificial Sequence
  Synthetic Sequence
atggatagtc

SEQ ID NO: 9135 - DNA, 10 bp, Artificial Sequence
  Synthetic Sequence
gtcttaggct

SEQ ID NO: 9136 - DNA, 10 bp, Artificial Sequence
  Synthetic Sequence
cgactttcaa

SEQ ID NO: 9137 - DNA, 10 bp, Artificial Sequence
  Synthetic Sequence
ctgttatgcg

SEQ ID NO: 9138 - DNA, 10 bp, Artificial Sequence
  Synthetic Sequence
agggtaagcg

SEQ ID NO: 9139 - DNA, 10 bp, Artificial Sequence
  Synthetic Sequence
cactttggac

SEQ ID NO: 9140 - DNA, 10 bp, Artificial Sequence
  Synthetic Sequence
aagagccaca

SEQ ID NO: 9141 - DNA, 10 bp, Artificial Sequence
  Synthetic Sequence
gggctcctct

SEQ ID NO: 9142 - DNA, 10 bp, Artificial Sequence
  Synthetic Sequence
aagccgaccg

SEQ ID NO: 9143 - DNA, 10 bp, Artificial Sequence
  Synthetic Sequence
cataatggta

SEQ ID NO: 9144 - DNA, 10 bp, Artificial Sequence
  Synthetic Sequence
ggagactcca

SEQ ID NO: 9145 - DNA, 10 bp, Artificial Sequence
  Synthetic Sequence
gcatgcttac

SEQ ID NO: 9146 - DNA, 10 bp, Artificial Sequence
  Synthetic Sequence
tgcattgtgc

SEQ ID NO: 9147 - DNA, 10 bp, Artificial Sequence
  Synthetic Sequence
tatcagcgct

SEQ ID NO: 9148 - DNA, 10 bp, Artificial Sequence
  Synthetic Sequence
tcatctggta

SEQ ID NO: 9149 - DNA, 10 bp, Artificial Sequence
  Synthetic Sequence
cagtggaacg

SEQ ID NO: 9150 - DNA, 10 bp, Artificial Sequence
  Synthetic Sequence
cagttgggaa

SEQ ID NO: 9151 - DNA, 10 bp, Artificial Sequence
  Synthetic Sequence
gccttctgga

SEQ ID NO: 9152 - DNA, 10 bp, Artificial Sequence
  Synthetic Sequence
ttagcaatgt

SEQ ID NO: 9153 - DNA, 10 bp, Artificial Sequence
  Synthetic Sequence
tctttcctag

SEQ ID NO: 9154 - DNA, 10 bp, Artificial Sequence
  Synthetic Sequence
gagaaggcgc

SEQ ID NO: 9155 - DNA, 10 bp, Artificial Sequence
  Synthetic Sequence
ccgtgatttc

SEQ ID NO: 9156 - DNA, 10 bp, Artificial Sequence
  Synthetic Sequence
tttgtaccat

SEQ ID NO: 9157 - DNA, 10 bp, Artificial Sequence
  Synthetic Sequence
aagccttgtt

SEQ ID NO: 9158 - DNA, 10 bp, Artificial Sequence
  Synthetic Sequence
aaccatggaa

SEQ ID NO: 9159 - DNA, 10 bp, Artificial Sequence
  Synthetic Sequence
tcgggattgg

SEQ ID NO: 9160 - DNA, 10 bp, Artificial Sequence
  Synthetic Sequence
ggtgttaagg

SEQ ID NO: 9161 - DNA, 10 bp, Artificial Sequence
  Synthetic Sequence
gatacctgtc

SEQ ID NO: 9162 - DNA, 10 bp, Artificial Sequence
  Synthetic Sequence
attgacagca

SEQ ID NO: 9163 - DNA, 10 bp, Artificial Sequence
  Synthetic Sequence
gataccgacc

SEQ ID NO: 9164 - DNA, 10 bp, Artificial Sequence
  Synthetic Sequence
tgctaatgat

SEQ ID NO: 9165 - DNA, 10 bp, Artificial Sequence
  Synthetic Sequence
ccaacattag

SEQ ID NO: 9166 - DNA, 10 bp, Artificial Sequence
  Synthetic Sequence
agataagata

SEQ ID NO: 9167 - DNA, 10 bp, Artificial Sequence
  Synthetic Sequence
atctgtataa

SEQ ID NO: 9168 - DNA, 10 bp, Artificial Sequence
  Synthetic Sequence
tccagcatgc

SEQ ID NO: 9169 - DNA, 10 bp, Artificial Sequence
  Synthetic Sequence
aaatcgtggc

SEQ ID NO: 9170 - DNA, 10 bp, Artificial Sequence
  Synthetic Sequence
taattgccag

SEQ ID NO: 9171 - DNA, 10 bp, Artificial Sequence
  Synthetic Sequence
tcccagttat

SEQ ID NO: 9172 - DNA, 10 bp, Artificial Sequence
  Synthetic Sequence
gatgcgctcc

SEQ ID NO: 9173 - DNA, 10 bp, Artificial Sequence
  Synthetic Sequence
taattagaca

SEQ ID NO: 9174 - DNA, 10 bp, Artificial Sequence
  Synthetic Sequence
ctggtgcacc

SEQ ID NO: 9175 - DNA, 10 bp, Artificial Sequence
  Synthetic Sequence
agcccttatg

SEQ ID NO: 9176 - DNA, 10 bp, Artificial Sequence
  Synthetic Sequence
tgggcaactc

SEQ ID NO: 9177 - DNA, 10 bp, Artificial Sequence
  Synthetic Sequence
gttgctgtgc

SEQ ID NO: 9178 - DNA, 10 bp, Artificial Sequence
  Synthetic Sequence
acttggtctc

SEQ ID NO: 9179 - DNA, 10 bp, Artificial Sequence
  Synthetic Sequence
ctttccaatg

SEQ ID NO: 9180 - DNA, 10 bp, Artificial Sequence
  Synthetic Sequence
tgagtcacgc

SEQ ID NO: 9181 - DNA, 10 bp, Artificial Sequence
  Synthetic Sequence
tacggcattc

SEQ ID NO: 9182 - DNA, 10 bp, Artificial Sequence
  Synthetic Sequence
ttaattcctt

SEQ ID NO: 9183 - DNA, 10 bp, Artificial Sequence
  Synthetic Sequence
acactgatta

SEQ ID NO: 9184 - DNA, 10 bp, Artificial Sequence
  Synthetic Sequence
tgaggccggt

SEQ ID NO: 9185 - DNA, 10 bp, Artificial Sequence
  Synthetic Sequence
gcaagaggct

SEQ ID NO: 9186 - DNA, 10 bp, Artificial Sequence
  Synthetic Sequence
tacttctata

SEQ ID NO: 9187 - DNA, 10 bp, Artificial Sequence
  Synthetic Sequence
gcttcgctac

SEQ ID NO: 9188 - DNA, 10 bp, Artificial Sequence
  Synthetic Sequence
cccatttacg

SEQ ID NO: 9189 - DNA, 10 bp, Artificial Sequence
  Synthetic Sequence
cactgccttg

SEQ ID NO: 9190 - DNA, 10 bp, Artificial Sequence
  Synthetic Sequence
aagtgctcag

SEQ ID NO: 9191 - DNA, 10 bp, Artificial Sequence
  Synthetic Sequence
gctgctcgtt

SEQ ID NO: 9192 - DNA, 10 bp, Artificial Sequence
  Synthetic Sequence
gatagcgcag

SEQ ID NO: 9193 - DNA, 10 bp, Artificial Sequence
  Synthetic Sequence
ttcggaggga

SEQ ID NO: 9194 - DNA, 10 bp, Artificial Sequence
  Synthetic Sequence
ccaggtcaac

SEQ ID NO: 9195 - DNA, 10 bp, Artificial Sequence
  Synthetic Sequence
agcctccgag

SEQ ID NO: 9196 - DNA, 10 bp, Artificial Sequence
  Synthetic Sequence
aaccaggtac

SEQ ID NO: 9197 - DNA, 10 bp, Artificial Sequence
  Synthetic Sequence
gtggaggact

SEQ ID NO: 9198 - DNA, 10 bp, Artificial Sequence
  Synthetic Sequence
cgtgctgaac

SEQ ID NO: 9199 - DNA, 10 bp, Artificial Sequence
  Synthetic Sequence
acgatggcgt

SEQ ID NO: 9200 - DNA, 10 bp, Artificial Sequence
  Synthetic Sequence
gctgaaggga

SEQ ID NO: 9201 - DNA, 10 bp, Artificial Sequence
  Synthetic Sequence
aatattaagg

SEQ ID NO: 9202 - DNA, 10 bp, Artificial Sequence
  Synthetic Sequence
ctagggctta

SEQ ID NO: 9203 - DNA, 10 bp, Artificial Sequence
  Synthetic Sequence
caattcccat

SEQ ID NO: 9204 - DNA, 10 bp, Artificial Sequence
  Synthetic Sequence
gactctgcct

SEQ ID NO: 9205 - DNA, 10 bp, Artificial Sequence
  Synthetic Sequence
tgctcgacag

SEQ ID NO: 9206 - DNA, 10 bp, Artificial Sequence
  Synthetic Sequence
aaacacatcc

SEQ ID NO: 9207 - DNA, 10 bp, Artificial Sequence
  Synthetic Sequence
ggttggtacc

SEQ ID NO: 9208 - DNA, 10 bp, Artificial Sequence
  Synthetic Sequence
atttgtcgtc

SEQ ID NO: 9209 - DNA, 10 bp, Artificial Sequence
  Synthetic Sequence
aacgtgacac

SEQ ID NO: 9210 - DNA, 10 bp, Artificial Sequence
  Synthetic Sequence
caagacgtgg

SEQ ID NO: 9211 - DNA, 10 bp, Artificial Sequence
  Synthetic Sequence
cgtgcttcgg

SEQ ID NO: 9212 - DNA, 10 bp, Artificial Sequence
  Synthetic Sequence
gcggtgtgga

SEQ ID NO: 9213 - DNA, 10 bp, Artificial Sequence
  Synthetic Sequence
gcacttcact

SEQ ID NO: 9214 - DNA, 10 bp, Artificial Sequence
  Synthetic Sequence
catgttcctg

SEQ ID NO: 9215 - DNA, 10 bp, Artificial Sequence
  Synthetic Sequence
tcgaggcctc

SEQ ID NO: 9216 - DNA, 10 bp, Artificial Sequence
  Synthetic Sequence
cgaatgaagt

SEQ ID NO: 9217 - DNA, 10 bp, Artificial Sequence
  Synthetic Sequence
aagcaatcct

SEQ ID NO: 9218 - DNA, 10 bp, Artificial Sequence
  Synthetic Sequence
acttgaagca

SEQ ID NO: 9219 - DNA, 10 bp, Artificial Sequence
  Synthetic Sequence
tggtacctag

SEQ ID NO: 9220 - DNA, 10 bp, Artificial Sequence
  Synthetic Sequence
ctgcccgaca

SEQ ID NO: 9221 - DNA, 10 bp, Artificial Sequence
  Synthetic Sequence
ttaagtagat

SEQ ID NO: 9222 - DNA, 10 bp, Artificial Sequence
  Synthetic Sequence
gtactatgtg

SEQ ID NO: 9223 - DNA, 10 bp, Artificial Sequence
  Synthetic Sequence
gctgtcaaat

SEQ ID NO: 9224 - DNA, 10 bp, Artificial Sequence
  Synthetic Sequence
agtgcgcgtc

SEQ ID NO: 9225 - DNA, 10 bp, Artificial Sequence
  Synthetic Sequence
ggccgttctt

SEQ ID NO: 9226 - DNA, 10 bp, Artificial Sequence
  Synthetic Sequence
catcaatacc

SEQ ID NO: 9227 - DNA, 10 bp, Artificial Sequence
  Synthetic Sequence
atagagggaa

SEQ ID NO: 9228 - DNA, 10 bp, Artificial Sequence
  Synthetic Sequence
atacaaacac

SEQ ID NO: 9229 - DNA, 10 bp, Artificial Sequence
  Synthetic Sequence
ctacacccat

SEQ ID NO: 9230 - DNA, 10 bp, Artificial Sequence
  Synthetic Sequence
tagggatccg

SEQ ID NO: 9231 - DNA, 10 bp, Artificial Sequence
  Synthetic Sequence
acccttgcgg

SEQ ID NO: 9232 - DNA, 10 bp, Artificial Sequence
  Synthetic Sequence
aagcggatga

SEQ ID NO: 9233 - DNA, 10 bp, Artificial Sequence
  Synthetic Sequence
ttctagaagt

SEQ ID NO: 9234 - DNA, 10 bp, Artificial Sequence
  Synthetic Sequence
caggtgagac

SEQ ID NO: 9235 - DNA, 10 bp, Artificial Sequence
  Synthetic Sequence
actactcccg

SEQ ID NO: 9236 - DNA, 10 bp, Artificial Sequence
  Synthetic Sequence
tatcgtcttt

SEQ ID NO: 9237 - DNA, 10 bp, Artificial Sequence
  Synthetic Sequence
gtccgactga

SEQ ID NO: 9238 - DNA, 10 bp, Artificial Sequence
  Synthetic Sequence
atataaactg

SEQ ID NO: 9239 - DNA, 10 bp, Artificial Sequence
  Synthetic Sequence
gatatgtgat

SEQ ID NO: 9240 - DNA, 10 bp, Artificial Sequence
  Synthetic Sequence
tatttcgcaa

SEQ ID NO: 9241 - DNA, 10 bp, Artificial Sequence
  Synthetic Sequence
gatgcacata

SEQ ID NO: 9242 - DNA, 10 bp, Artificial Sequence
  Synthetic Sequence
tatggccctt

SEQ ID NO: 9243 - DNA, 10 bp, Artificial Sequence
  Synthetic Sequence
ctattattca

SEQ ID NO: 9244 - DNA, 10 bp, Artificial Sequence
  Synthetic Sequence
atcacgacca

SEQ ID NO: 9245 - DNA, 10 bp, Artificial Sequence
  Synthetic Sequence
gctcttactt

SEQ ID NO: 9246 - DNA, 10 bp, Artificial Sequence
  Synthetic Sequence
ggacccactc

SEQ ID NO: 9247 - DNA, 10 bp, Artificial Sequence
  Synthetic Sequence
actgacgtcg

SEQ ID NO: 9248 - DNA, 10 bp, Artificial Sequence
  Synthetic Sequence
aagttgttca

SEQ ID NO: 9249 - DNA, 10 bp, Artificial Sequence
  Synthetic Sequence
atttgtggaa

SEQ ID NO: 9250 - DNA, 10 bp, Artificial Sequence
  Synthetic Sequence
gacctttgac

SEQ ID NO: 9251 - DNA, 10 bp, Artificial Sequence
  Synthetic Sequence
gaagagcccg

SEQ ID NO: 9252 - DNA, 10 bp, Artificial Sequence
  Synthetic Sequence
gcgggagatt

SEQ ID NO: 9253 - DNA, 10 bp, Artificial Sequence
  Synthetic Sequence
atctgctgtc

SEQ ID NO: 9254 - DNA, 10 bp, Artificial Sequence
  Synthetic Sequence
ttacgggcct

SEQ ID NO: 9255 - DNA, 10 bp, Artificial Sequence
  Synthetic Sequence
attgtttaat

SEQ ID NO: 9256 - DNA, 10 bp, Artificial Sequence
  Synthetic Sequence
gcaatacctt

SEQ ID NO: 9257 - DNA, 10 bp, Artificial Sequence
  Synthetic Sequence
gattattccc

SEQ ID NO: 9258 - DNA, 10 bp, Artificial Sequence
  Synthetic Sequence
ccggatctac

SEQ ID NO: 9259 - DNA, 10 bp, Artificial Sequence
  Synthetic Sequence
ctccatgtcg

SEQ ID NO: 9260 - DNA, 10 bp, Artificial Sequence
  Synthetic Sequence
tcacatacgg

SEQ ID NO: 9261 - DNA, 10 bp, Artificial Sequence
  Synthetic Sequence
ttcaacgttt

SEQ ID NO: 9262 - DNA, 10 bp, Artificial Sequence
  Synthetic Sequence
ggtctcagac

SEQ ID NO: 9263 - DNA, 10 bp, Artificial Sequence
  Synthetic Sequence
cattccacct

SEQ ID NO: 9264 - DNA, 10 bp, Artificial Sequence
  Synthetic Sequence
tggccgctag

SEQ ID NO: 9265 - DNA, 10 bp, Artificial Sequence
  Synthetic Sequence
cgatttatat

SEQ ID NO: 9266 - DNA, 10 bp, Artificial Sequence
  Synthetic Sequence
ccagtcttgg

SEQ ID NO: 9267 - DNA, 10 bp, Artificial Sequence
  Synthetic Sequence
gtgcagcgtg

SEQ ID NO: 9268 - DNA, 10 bp, Artificial Sequence
  Synthetic Sequence
tcacatgtct

SEQ ID NO: 9269 - DNA, 10 bp, Artificial Sequence
  Synthetic Sequence
cctcctaggg

SEQ ID NO: 9270 - DNA, 10 bp, Artificial Sequence
  Synthetic Sequence
tgtaggtaag

SEQ ID NO: 9271 - DNA, 10 bp, Artificial Sequence
  Synthetic Sequence
agatgaaccg

SEQ ID NO: 9272 - DNA, 10 bp, Artificial Sequence
  Synthetic Sequence
ctagggaggt

SEQ ID NO: 9273 - DNA, 10 bp, Artificial Sequence
  Synthetic Sequence
atgccacgat

SEQ ID NO: 9274 - DNA, 10 bp, Artificial Sequence
  Synthetic Sequence
cagagcaggg

SEQ ID NO: 9275 - DNA, 10 bp, Artificial Sequence
  Synthetic Sequence
agtgaagtga

SEQ ID NO: 9276 - DNA, 10 bp, Artificial Sequence
  Synthetic Sequence
agggagtaga

SEQ ID NO: 9277 - DNA, 10 bp, Artificial Sequence
  Synthetic Sequence
ggttgctcaa

SEQ ID NO: 9278 - DNA, 10 bp, Artificial Sequence
  Synthetic Sequence
gagcacggta

SEQ ID NO: 9279 - DNA, 10 bp, Artificial Sequence
  Synthetic Sequence
cagcgagtcg

SEQ ID NO: 9280 - DNA, 10 bp, Artificial Sequence
  Synthetic Sequence
attctcctga

SEQ ID NO: 9281 - DNA, 10 bp, Artificial Sequence
  Synthetic Sequence
acagttaagt

SEQ ID NO: 9282 - DNA, 10 bp, Artificial Sequence
  Synthetic Sequence
attcactcga

SEQ ID NO: 9283 - DNA, 10 bp, Artificial Sequence
  Synthetic Sequence
tccaaataag

SEQ ID NO: 9284 - DNA, 10 bp, Artificial Sequence
  Synthetic Sequence
tcacggcatg

SEQ ID NO: 9285 - DNA, 10 bp, Artificial Sequence
  Synthetic Sequence
accgttcatt

SEQ ID NO: 9286 - DNA, 10 bp, Artificial Sequence
  Synthetic Sequence
cgatggacga

SEQ ID NO: 9287 - DNA, 10 bp, Artificial Sequence
  Synthetic Sequence
ccgaatgtga

SEQ ID NO: 9288 - DNA, 10 bp, Artificial Sequence
  Synthetic Sequence
gttgcgccct

SEQ ID NO: 9289 - DNA, 10 bp, Artificial Sequence
  Synthetic Sequence
ccctattgta

SEQ ID NO: 9290 - DNA, 10 bp, Artificial Sequence
  Synthetic Sequence
tttagtacgg

SEQ ID NO: 9291 - DNA, 10 bp, Artificial Sequence
  Synthetic Sequence
actccagtgg

SEQ ID NO: 9292 - DNA, 10 bp, Artificial Sequence
  Synthetic Sequence
taggtctaag

SEQ ID NO: 9293 - DNA, 10 bp, Artificial Sequence
  Synthetic Sequence
tccgacatgg

SEQ ID NO: 9294 - DNA, 10 bp, Artificial Sequence
  Synthetic Sequence
tatcacacag

SEQ ID NO: 9295 - DNA, 10 bp, Artificial Sequence
  Synthetic Sequence
tatactcaag

SEQ ID NO: 9296 - DNA, 10 bp, Artificial Sequence
  Synthetic Sequence
cccgccaaag

SEQ ID NO: 9297 - DNA, 10 bp, Artificial Sequence
  Synthetic Sequence
gcgagggata

SEQ ID NO: 9298 - DNA, 10 bp, Artificial Sequence
  Synthetic Sequence
agcgccggtt

SEQ ID NO: 9299 - DNA, 10 bp, Artificial Sequence
  Synthetic Sequence
ttactcttat

SEQ ID NO: 9300 - DNA, 10 bp, Artificial Sequence
  Synthetic Sequence
ccaacacccg

SEQ ID NO: 9301 - DNA, 10 bp, Artificial Sequence
  Synthetic Sequence
tcgagcgtca

SEQ ID NO: 9302 - DNA, 10 bp, Artificial Sequence
  Synthetic Sequence
tccctccact

SEQ ID NO: 9303 - DNA, 10 bp, Artificial Sequence
  Synthetic Sequence
gtgtcaccgg

SEQ ID NO: 9304 - DNA, 10 bp, Artificial Sequence
  Synthetic Sequence
ccttgtggga

SEQ ID NO: 9305 - DNA, 10 bp, Artificial Sequence
  Synthetic Sequence
actatagcat

SEQ ID NO: 9306 - DNA, 10 bp, Artificial Sequence
  Synthetic Sequence
acacttagct

SEQ ID NO: 9307 - DNA, 10 bp, Artificial Sequence
  Synthetic Sequence
cgttctcgta

SEQ ID NO: 9308 - DNA, 10 bp, Artificial Sequence
  Synthetic Sequence
tgggaaatcg

SEQ ID NO: 9309 - DNA, 10 bp, Artificial Sequence
  Synthetic Sequence
aaaggttacc

SEQ ID NO: 9310 - DNA, 10 bp, Artificial Sequence
  Synthetic Sequence
attctttgca

SEQ ID NO: 9311 - DNA, 10 bp, Artificial Sequence
  Synthetic Sequence
atcaaacctg

SEQ ID NO: 9312 - DNA, 10 bp, Artificial Sequence
  Synthetic Sequence
ataacagtgc

SEQ ID NO: 9313 - DNA, 10 bp, Artificial Sequence
  Synthetic Sequence
cagcatattg

SEQ ID NO: 9314 - DNA, 10 bp, Artificial Sequence
  Synthetic Sequence
ctcggctctt

SEQ ID NO: 9315 - DNA, 10 bp, Artificial Sequence
  Synthetic Sequence
attcgtctcc

SEQ ID NO: 9316 - DNA, 10 bp, Artificial Sequence
  Synthetic Sequence
ttatattgag

SEQ ID NO: 9317 - DNA, 10 bp, Artificial Sequence
  Synthetic Sequence
gaacggttta

SEQ ID NO: 9318 - DNA, 10 bp, Artificial Sequence
  Synthetic Sequence
gagaacgcat

SEQ ID NO: 9319 - DNA, 10 bp, Artificial Sequence
  Synthetic Sequence
ctcgcacgca

SEQ ID NO: 9320 - DNA, 10 bp, Artificial Sequence
  Synthetic Sequence
ttaagcgctg

SEQ ID NO: 9321 - DNA, 10 bp, Artificial Sequence
  Synthetic Sequence
ggcaagtggg

SEQ ID NO: 9322 - DNA, 10 bp, Artificial Sequence
  Synthetic Sequence
tctcgacatc

SEQ ID NO: 9323 - DNA, 10 bp, Artificial Sequence
  Synthetic Sequence
tttcagatgg

SEQ ID NO: 9324 - DNA, 10 bp, Artificial Sequence
  Synthetic Sequence
ttcccagtcc

SEQ ID NO: 9325 - DNA, 10 bp, Artificial Sequence
  Synthetic Sequence
tcagtaccga

SEQ ID NO: 9326 - DNA, 10 bp, Artificial Sequence
  Synthetic Sequence
ctgcataata

SEQ ID NO: 9327 - DNA, 10 bp, Artificial Sequence
  Synthetic Sequence
tcagtcgagg

SEQ ID NO: 9328 - DNA, 10 bp, Artificial Sequence
  Synthetic Sequence
gtggtacagt

SEQ ID NO: 9329 - DNA, 10 bp, Artificial Sequence
  Synthetic Sequence
tagggaaggc

SEQ ID NO: 9330 - DNA, 10 bp, Artificial Sequence
  Synthetic Sequence
atctagtgga

SEQ ID NO: 9331 - DNA, 10 bp, Artificial Sequence
  Synthetic Sequence
actcgcccac

SEQ ID NO: 9332 - DNA, 10 bp, Artificial Sequence
  Synthetic Sequence
actcacatct

SEQ ID NO: 9333 - DNA, 10 bp, Artificial Sequence
  Synthetic Sequence
agcggctagg

SEQ ID NO: 9334 - DNA, 10 bp, Artificial Sequence
  Synthetic Sequence
atcgaacgcg

SEQ ID NO: 9335 - DNA, 10 bp, Artificial Sequence
  Synthetic Sequence
agactaagag

SEQ ID NO: 9336 - DNA, 10 bp, Artificial Sequence
  Synthetic Sequence
gggcgaaaga

SEQ ID NO: 9337 - DNA, 10 bp, Artificial Sequence
  Synthetic Sequence
ctaccctctg

SEQ ID NO: 9338 - DNA, 10 bp, Artificial Sequence
  Synthetic Sequence
actcagtagt

SEQ ID NO: 9339 - DNA, 10 bp, Artificial Sequence
  Synthetic Sequence
gtaagacggt

SEQ ID NO: 9340 - DNA, 10 bp, Artificial Sequence
  Synthetic Sequence
ataaagctag

SEQ ID NO: 9341 - DNA, 10 bp, Artificial Sequence
  Synthetic Sequence
gttgtgcggc

SEQ ID NO: 9342 - DNA, 10 bp, Artificial Sequence
  Synthetic Sequence
attagcactt

SEQ ID NO: 9343 - DNA, 10 bp, Artificial Sequence
  Synthetic Sequence
cacaaggaaa

SEQ ID NO: 9344 - DNA, 10 bp, Artificial Sequence
  Synthetic Sequence
ccatgacgcc

SEQ ID NO: 9345 - DNA, 10 bp, Artificial Sequence
  Synthetic Sequence
attaaccaat

SEQ ID NO: 9346 - DNA, 10 bp, Artificial Sequence
  Synthetic Sequence
acgattcgaa

SEQ ID NO: 9347 - DNA, 10 bp, Artificial Sequence
  Synthetic Sequence
aggcagcgaa

SEQ ID NO: 9348 - DNA, 10 bp, Artificial Sequence
  Synthetic Sequence
ttgcggtcca

SEQ ID NO: 9349 - DNA, 10 bp, Artificial Sequence
  Synthetic Sequence
gagttactag

SEQ ID NO: 9350 - DNA, 10 bp, Artificial Sequence
  Synthetic Sequence
cccgggcata

SEQ ID NO: 9351 - DNA, 10 bp, Artificial Sequence
  Synthetic Sequence
cccacgacta

SEQ ID NO: 9352 - DNA, 10 bp, Artificial Sequence
  Synthetic Sequence
ataatcccta

SEQ ID NO: 9353 - DNA, 10 bp, Artificial Sequence
  Synthetic Sequence
taaccgcgcc

SEQ ID NO: 9354 - DNA, 10 bp, Artificial Sequence
  Synthetic Sequence
acgtcagatg

SEQ ID NO: 9355 - DNA, 10 bp, Artificial Sequence
  Synthetic Sequence
catgcagcgg

SEQ ID NO: 9356 - DNA, 10 bp, Artificial Sequence
  Synthetic Sequence
ctgtcgtact

SEQ ID NO: 9357 - DNA, 10 bp, Artificial Sequence
  Synthetic Sequence
aacgtagcgc

SEQ ID NO: 9358 - DNA, 10 bp, Artificial Sequence
  Synthetic Sequence
atcgcccacg

SEQ ID NO: 9359 - DNA, 10 bp, Artificial Sequence
  Synthetic Sequence
cgcatctggt

SEQ ID NO: 9360 - DNA, 10 bp, Artificial Sequence
  Synthetic Sequence
gagttggtgg

SEQ ID NO: 9361 - DNA, 10 bp, Artificial Sequence
  Synthetic Sequence
actgggccgt

SEQ ID NO: 9362 - DNA, 10 bp, Artificial Sequence
  Synthetic Sequence
gactcatttg

SEQ ID NO: 9363 - DNA, 10 bp, Artificial Sequence
  Synthetic Sequence
agcttctagt

SEQ ID NO: 9364 - DNA, 10 bp, Artificial Sequence
  Synthetic Sequence
acgtgatggg

SEQ ID NO: 9365 - DNA, 10 bp, Artificial Sequence
  Synthetic Sequence
gccaggaact

SEQ ID NO: 9366 - DNA, 10 bp, Artificial Sequence
  Synthetic Sequence
aagtatggtc

SEQ ID NO: 9367 - DNA, 10 bp, Artificial Sequence
  Synthetic Sequence
ggtggatgta

SEQ ID NO: 9368 - DNA, 10 bp, Artificial Sequence
  Synthetic Sequence
tccgcacaaa

SEQ ID NO: 9369 - DNA, 10 bp, Artificial Sequence
  Synthetic Sequence
gtcgtgtttg

SEQ ID NO: 9370 - DNA, 10 bp, Artificial Sequence
  Synthetic Sequence
ccgaccctga

SEQ ID NO: 9371 - DNA, 10 bp, Artificial Sequence
  Synthetic Sequence
gacgcacagt

SEQ ID NO: 9372 - DNA, 10 bp, Artificial Sequence
  Synthetic Sequence
aagcaaagtg

SEQ ID NO: 9373 - DNA, 10 bp, Artificial Sequence
  Synthetic Sequence
agggttcaaa

SEQ ID NO: 9374 - DNA, 10 bp, Artificial Sequence
  Synthetic Sequence
acgagctagc

SEQ ID NO: 9375 - DNA, 10 bp, Artificial Sequence
  Synthetic Sequence
gacgttggga

SEQ ID NO: 9376 - DNA, 10 bp, Artificial Sequence
  Synthetic Sequence
cagacgcgat

SEQ ID NO: 9377 - DNA, 10 bp, Artificial Sequence
  Synthetic Sequence
ctaatctgtt

SEQ ID NO: 9378 - DNA, 10 bp, Artificial Sequence
  Synthetic Sequence
gttcttcgtt

SEQ ID NO: 9379 - DNA, 10 bp, Artificial Sequence
  Synthetic Sequence
ttataattgt

SEQ ID NO: 9380 - DNA, 10 bp, Artificial Sequence
  Synthetic Sequence
ttgcgtgtca

SEQ ID NO: 9381 - DNA, 10 bp, Artificial Sequence
  Synthetic Sequence
ttgctatggg

SEQ ID NO: 9382 - DNA, 10 bp, Artificial Sequence
  Synthetic Sequence
gatcgtatgc

SEQ ID NO: 9383 - DNA, 10 bp, Artificial Sequence
  Synthetic Sequence
gtggtaaacg

SEQ ID NO: 9384 - DNA, 10 bp, Artificial Sequence
  Synthetic Sequence
tgagacgacc

SEQ ID NO: 9385 - DNA, 10 bp, Artificial Sequence
  Synthetic Sequence
aagggacctg

SEQ ID NO: 9386 - DNA, 10 bp, Artificial Sequence
  Synthetic Sequence
ctctggatat

SEQ ID NO: 9387 - DNA, 10 bp, Artificial Sequence
  Synthetic Sequence
tctttatgcc

SEQ ID NO: 9388 - DNA, 10 bp, Artificial Sequence
  Synthetic Sequence
gttcggcgga

SEQ ID NO: 9389 - DNA, 10 bp, Artificial Sequence
  Synthetic Sequence
gttgaggcgg

SEQ ID NO: 9390 - DNA, 10 bp, Artificial Sequence
  Synthetic Sequence
ttgtagatga

SEQ ID NO: 9391 - DNA, 10 bp, Artificial Sequence
  Synthetic Sequence
gtactctctt

SEQ ID NO: 9392 - DNA, 10 bp, Artificial Sequence
  Synthetic Sequence
tagtttagtg

SEQ ID NO: 9393 - DNA, 10 bp, Artificial Sequence
  Synthetic Sequence
gatcgcactg

SEQ ID NO: 9394 - DNA, 10 bp, Artificial Sequence
  Synthetic Sequence
cgttaaattt

SEQ ID NO: 9395 - DNA, 10 bp, Artificial Sequence
  Synthetic Sequence
aattgctcca

SEQ ID NO: 9396 - DNA, 10 bp, Artificial Sequence
  Synthetic Sequence
gtttagtacg

SEQ ID NO: 9397 - DNA, 10 bp, Artificial Sequence
  Synthetic Sequence
atcagcatat

SEQ ID NO: 9398 - DNA, 10 bp, Artificial Sequence
  Synthetic Sequence
aattcacctg

SEQ ID NO: 9399 - DNA, 10 bp, Artificial Sequence
  Synthetic Sequence
taggtatact

SEQ ID NO: 9400 - DNA, 10 bp, Artificial Sequence
  Synthetic Sequence
gtgagaagta

SEQ ID NO: 9401 - DNA, 10 bp, Artificial Sequence
  Synthetic Sequence
gacctatccc

SEQ ID NO: 9402 - DNA, 10 bp, Artificial Sequence
  Synthetic Sequence
agcgcgcttg

SEQ ID NO: 9403 - DNA, 10 bp, Artificial Sequence
  Synthetic Sequence
gaagcttcac

SEQ ID NO: 9404 - DNA, 10 bp, Artificial Sequence
  Synthetic Sequence
gtattagcat

SEQ ID NO: 9405 - DNA, 10 bp, Artificial Sequence
  Synthetic Sequence
ttcgcgaaca

SEQ ID NO: 9406 - DNA, 10 bp, Artificial Sequence
  Synthetic Sequence
atgtcacaca

SEQ ID NO: 9407 - DNA, 10 bp, Artificial Sequence
  Synthetic Sequence
gatgcatggg

SEQ ID NO: 9408 - DNA, 10 bp, Artificial Sequence
  Synthetic Sequence
tcttagttcc

SEQ ID NO: 9409 - DNA, 10 bp, Artificial Sequence
  Synthetic Sequence
tagctgttct

SEQ ID NO: 9410 - DNA, 10 bp, Artificial Sequence
  Synthetic Sequence
acgggtcctc

SEQ ID NO: 9411 - DNA, 10 bp, Artificial Sequence
  Synthetic Sequence
ctgcaccgta

SEQ ID NO: 9412 - DNA, 10 bp, Artificial Sequence
  Synthetic Sequence
ggatccctga

SEQ ID NO: 9413 - DNA, 10 bp, Artificial Sequence
  Synthetic Sequence
cacactggat

SEQ ID NO: 9414 - DNA, 10 bp, Artificial Sequence
  Synthetic Sequence
gtcagggcta

SEQ ID NO: 9415 - DNA, 10 bp, Artificial Sequence
  Synthetic Sequence
ttacgggaaa

SEQ ID NO: 9416 - DNA, 10 bp, Artificial Sequence
  Synthetic Sequence
ataccgagtc

SEQ ID NO: 9417 - DNA, 10 bp, Artificial Sequence
  Synthetic Sequence
tcagcaaacc

SEQ ID NO: 9418 - DNA, 10 bp, Artificial Sequence
  Synthetic Sequence
agtatacgag

SEQ ID NO: 9419 - DNA, 10 bp, Artificial Sequence
  Synthetic Sequence
caccacagtc

SEQ ID NO: 9420 - DNA, 10 bp, Artificial Sequence
  Synthetic Sequence
gtctatttga

SEQ ID NO: 9421 - DNA, 10 bp, Artificial Sequence
  Synthetic Sequence
aacaatcgtt

SEQ ID NO: 9422 - DNA, 10 bp, Artificial Sequence
  Synthetic Sequence
cttggtgatc

SEQ ID NO: 9423 - DNA, 10 bp, Artificial Sequence
  Synthetic Sequence
tcgacaagta

SEQ ID NO: 9424 - DNA, 10 bp, Artificial Sequence
  Synthetic Sequence
cgatatgttt

SEQ ID NO: 9425 - DNA, 10 bp, Artificial Sequence
  Synthetic Sequence
gagtgccttt

SEQ ID NO: 9426 - DNA, 10 bp, Artificial Sequence
  Synthetic Sequence
ctcgtaccgc

SEQ ID NO: 9427 - DNA, 10 bp, Artificial Sequence
  Synthetic Sequence
aggctgtctc

SEQ ID NO: 9428 - DNA, 10 bp, Artificial Sequence
  Synthetic Sequence
cagatcgcaa

SEQ ID NO: 9429 - DNA, 10 bp, Artificial Sequence
  Synthetic Sequence
cagttagtgt

SEQ ID NO: 9430 - DNA, 10 bp, Artificial Sequence
  Synthetic Sequence
cagtcggcga

SEQ ID NO: 9431 - DNA, 10 bp, Artificial Sequence
  Synthetic Sequence
tcataccaac

SEQ ID NO: 9432 - DNA, 10 bp, Artificial Sequence
  Synthetic Sequence
taaatacagg

SEQ ID NO: 9433 - DNA, 10 bp, Artificial Sequence
  Synthetic Sequence
cgtagtagct

SEQ ID NO: 9434 - DNA, 10 bp, Artificial Sequence
  Synthetic Sequence
aatttgcgct

SEQ ID NO: 9435 - DNA, 10 bp, Artificial Sequence
  Synthetic Sequence
ttacgtatgc

SEQ ID NO: 9436 - DNA, 10 bp, Artificial Sequence
  Synthetic Sequence
aagaggaata

SEQ ID NO: 9437 - DNA, 10 bp, Artificial Sequence
  Synthetic Sequence
ggtttattcc

SEQ ID NO: 9438 - DNA, 10 bp, Artificial Sequence
  Synthetic Sequence
atgatcgttc

SEQ ID NO: 9439 - DNA, 10 bp, Artificial Sequence
  Synthetic Sequence
actgtcaggg

SEQ ID NO: 9440 - DNA, 10 bp, Artificial Sequence
  Synthetic Sequence
gcttcctacc

SEQ ID NO: 9441 - DNA, 10 bp, Artificial Sequence
  Synthetic Sequence
agacggacct

SEQ ID NO: 9442 - DNA, 10 bp, Artificial Sequence
  Synthetic Sequence
agcttcccac

SEQ ID NO: 9443 - DNA, 10 bp, Artificial Sequence
  Synthetic Sequence
atggacctgg

SEQ ID NO: 9444 - DNA, 10 bp, Artificial Sequence
  Synthetic Sequence
cgaggtaaat

SEQ ID NO: 9445 - DNA, 10 bp, Artificial Sequence
  Synthetic Sequence
cctcttaccg

SEQ ID NO: 9446 - DNA, 10 bp, Artificial Sequence
  Synthetic Sequence
cgcccggtat

SEQ ID NO: 9447 - DNA, 10 bp, Artificial Sequence
  Synthetic Sequence
actatttcgt

SEQ ID NO: 9448 - DNA, 10 bp, Artificial Sequence
  Synthetic Sequence
gagagtgcgg

SEQ ID NO: 9449 - DNA, 10 bp, Artificial Sequence
  Synthetic Sequence
gcggttggca

SEQ ID NO: 9450 - DNA, 10 bp, Artificial Sequence
  Synthetic Sequence
ttaacggttg

SEQ ID NO: 9451 - DNA, 10 bp, Artificial Sequence
  Synthetic Sequence
cgttgcatta

SEQ ID NO: 9452 - DNA, 10 bp, Artificial Sequence
  Synthetic Sequence
caggtagaaa

SEQ ID NO: 9453 - DNA, 10 bp, Artificial Sequence
  Synthetic Sequence
catgtgaatc

SEQ ID NO: 9454 - DNA, 10 bp, Artificial Sequence
  Synthetic Sequence
ggaaccgtgg

SEQ ID NO: 9455 - DNA, 10 bp, Artificial Sequence
  Synthetic Sequence
aagatcctat

SEQ ID NO: 9456 - DNA, 10 bp, Artificial Sequence
  Synthetic Sequence
actgctcact

SEQ ID NO: 9457 - DNA, 10 bp, Artificial Sequence
  Synthetic Sequence
gccaggtgga

SEQ ID NO: 9458 - DNA, 10 bp, Artificial Sequence
  Synthetic Sequence
agtgcagggc

SEQ ID NO: 9459 - DNA, 10 bp, Artificial Sequence
  Synthetic Sequence
tacggtggcc

SEQ ID NO: 9460 - DNA, 10 bp, Artificial Sequence
  Synthetic Sequence
ttcagtgcaa

SEQ ID NO: 9461 - DNA, 10 bp, Artificial Sequence
  Synthetic Sequence
attgagatcg

SEQ ID NO: 9462 - DNA, 10 bp, Artificial Sequence
  Synthetic Sequence
gatttgggag

SEQ ID NO: 9463 - DNA, 10 bp, Artificial Sequence
  Synthetic Sequence
gaattggcaa

SEQ ID NO: 9464 - DNA, 10 bp, Artificial Sequence
  Synthetic Sequence
tagcagaccc

SEQ ID NO: 9465 - DNA, 10 bp, Artificial Sequence
  Synthetic Sequence
gatacgaagt

SEQ ID NO: 9466 - DNA, 10 bp, Artificial Sequence
  Synthetic Sequence
aagcctgcca

SEQ ID NO: 9467 - DNA, 10 bp, Artificial Sequence
  Synthetic Sequence
ccaatgagta

SEQ ID NO: 9468 - DNA, 10 bp, Artificial Sequence
  Synthetic Sequence
ataagcggtc

SEQ ID NO: 9469 - DNA, 10 bp, Artificial Sequence
  Synthetic Sequence
taataagccc

SEQ ID NO: 9470 - DNA, 10 bp, Artificial Sequence
  Synthetic Sequence
gtgtcggttt

SEQ ID NO: 9471 - DNA, 10 bp, Artificial Sequence
  Synthetic Sequence
aacgaggcta

SEQ ID NO: 9472 - DNA, 10 bp, Artificial Sequence
  Synthetic Sequence
gactacgatc

SEQ ID NO: 9473 - DNA, 10 bp, Artificial Sequence
  Synthetic Sequence
cattgcctcc

SEQ ID NO: 9474 - DNA, 10 bp, Artificial Sequence
  Synthetic Sequence
ctgtttgggc

SEQ ID NO: 9475 - DNA, 10 bp, Artificial Sequence
  Synthetic Sequence
atagcgggtt

SEQ ID NO: 9476 - DNA, 10 bp, Artificial Sequence
  Synthetic Sequence
tttaagaccg

SEQ ID NO: 9477 - DNA, 10 bp, Artificial Sequence
  Synthetic Sequence
accacgccga

SEQ ID NO: 9478 - DNA, 10 bp, Artificial Sequence
  Synthetic Sequence
atatgcgtct

SEQ ID NO: 9479 - DNA, 10 bp, Artificial Sequence
  Synthetic Sequence
aaatggaggg

SEQ ID NO: 9480 - DNA, 10 bp, Artificial Sequence
  Synthetic Sequence
cactcagtag

SEQ ID NO: 9481 - DNA, 10 bp, Artificial Sequence
  Synthetic Sequence
caatttcact

SEQ ID NO: 9482 - DNA, 10 bp, Artificial Sequence
  Synthetic Sequence
agtcgtgagg

SEQ ID NO: 9483 - DNA, 10 bp, Artificial Sequence
  Synthetic Sequence
tacgagaggg

SEQ ID NO: 9484 - DNA, 10 bp, Artificial Sequence
  Synthetic Sequence
ttccggctct

SEQ ID NO: 9485 - DNA, 10 bp, Artificial Sequence
  Synthetic Sequence
aatttgctga

SEQ ID NO: 9486 - DNA, 10 bp, Artificial Sequence
  Synthetic Sequence
agtactgtgg

SEQ ID NO: 9487 - DNA, 10 bp, Artificial Sequence
  Synthetic Sequence
cggttcgttc

SEQ ID NO: 9488 - DNA, 10 bp, Artificial Sequence
  Synthetic Sequence
tatggaagaa

SEQ ID NO: 9489 - DNA, 10 bp, Artificial Sequence
  Synthetic Sequence
aacagagctg

SEQ ID NO: 9490 - DNA, 10 bp, Artificial Sequence
  Synthetic Sequence
tagtgcgtaa

SEQ ID NO: 9491 - DNA, 10 bp, Artificial Sequence
  Synthetic Sequence
agagtgaaat

SEQ ID NO: 9492 - DNA, 10 bp, Artificial Sequence
  Synthetic Sequence
gctatgtacc

SEQ ID NO: 9493 - DNA, 10 bp, Artificial Sequence
  Synthetic Sequence
gagctagctc

SEQ ID NO: 9494 - DNA, 10 bp, Artificial Sequence
  Synthetic Sequence
ctccgtgctt

SEQ ID NO: 9495 - DNA, 10 bp, Artificial Sequence
  Synthetic Sequence
caccttcacg

SEQ ID NO: 9496 - DNA, 10 bp, Artificial Sequence
  Synthetic Sequence
taactgacgt

SEQ ID NO: 9497 - DNA, 10 bp, Artificial Sequence
  Synthetic Sequence
tcgaagtcag

SEQ ID NO: 9498 - DNA, 10 bp, Artificial Sequence
  Synthetic Sequence
cgggaggttt

SEQ ID NO: 9499 - DNA, 10 bp, Artificial Sequence
  Synthetic Sequence
tgccacgctg

SEQ ID NO: 9500 - DNA, 10 bp, Artificial Sequence
  Synthetic Sequence
tcaacgccta

SEQ ID NO: 9501 - DNA, 10 bp, Artificial Sequence
  Synthetic Sequence
tttcagctcc

SEQ ID NO: 9502 - DNA, 10 bp, Artificial Sequence
  Synthetic Sequence
gtttctatcc

SEQ ID NO: 9503 - DNA, 10 bp, Artificial Sequence
  Synthetic Sequence
tacccgtgcg

SEQ ID NO: 9504 - DNA, 10 bp, Artificial Sequence
  Synthetic Sequence
acgcctattc

SEQ ID NO: 9505 - DNA, 10 bp, Artificial Sequence
  Synthetic Sequence
tcctcgtata

SEQ ID NO: 9506 - DNA, 10 bp, Artificial Sequence
  Synthetic Sequence
gtaaaggcca

SEQ ID NO: 9507 - DNA, 10 bp, Artificial Sequence
  Synthetic Sequence
cgaatatcgt

SEQ ID NO: 9508 - DNA, 10 bp, Artificial Sequence
  Synthetic Sequence
tagggcacac

SEQ ID NO: 9509 - DNA, 10 bp, Artificial Sequence
  Synthetic Sequence
ccagcctgtt

SEQ ID NO: 9510 - DNA, 10 bp, Artificial Sequence
  Synthetic Sequence
ctcgaaacgg

SEQ ID NO: 9511 - DNA, 10 bp, Artificial Sequence
  Synthetic Sequence
ctgttgaatg

SEQ ID NO: 9512 - DNA, 10 bp, Artificial Sequence
  Synthetic Sequence
tttctgtgac

SEQ ID NO: 9513 - DNA, 10 bp, Artificial Sequence
  Synthetic Sequence
tgcagggttt

SEQ ID NO: 9514 - DNA, 10 bp, Artificial Sequence
  Synthetic Sequence
gtcagttcac

SEQ ID NO: 9515 - DNA, 10 bp, Artificial Sequence
  Synthetic Sequence
ttctttccct

SEQ ID NO: 9516 - DNA, 10 bp, Artificial Sequence
  Synthetic Sequence
gcagtggatc

SEQ ID NO: 9517 - DNA, 10 bp, Artificial Sequence
  Synthetic Sequence
aatcaggact

SEQ ID NO: 9518 - DNA, 10 bp, Artificial Sequence
  Synthetic Sequence
gctgacctca

SEQ ID NO: 9519 - DNA, 10 bp, Artificial Sequence
  Synthetic Sequence
gggcaagagt

SEQ ID NO: 9520 - DNA, 10 bp, Artificial Sequence
  Synthetic Sequence
atcggacgtc

SEQ ID NO: 9521 - DNA, 10 bp, Artificial Sequence
  Synthetic Sequence
ggtaacgggt

SEQ ID NO: 9522 - DNA, 10 bp, Artificial Sequence
  Synthetic Sequence
gatacctcca

SEQ ID NO: 9523 - DNA, 10 bp, Artificial Sequence
  Synthetic Sequence
atactgaaag

SEQ ID NO: 9524 - DNA, 10 bp, Artificial Sequence
  Synthetic Sequence
ggctttcgtt

SEQ ID NO: 9525 - DNA, 10 bp, Artificial Sequence
  Synthetic Sequence
cctagtttca

SEQ ID NO: 9526 - DNA, 10 bp, Artificial Sequence
  Synthetic Sequence
aatatatcct

SEQ ID NO: 9527 - DNA, 10 bp, Artificial Sequence
  Synthetic Sequence
tctgtgtaat

SEQ ID NO: 9528 - DNA, 10 bp, Artificial Sequence
  Synthetic Sequence
ctcgcgcgtt

SEQ ID NO: 9529 - DNA, 10 bp, Artificial Sequence
  Synthetic Sequence
ggctccgcta

SEQ ID NO: 9530 - DNA, 10 bp, Artificial Sequence
  Synthetic Sequence
gagggacttc

SEQ ID NO: 9531 - DNA, 10 bp, Artificial Sequence
  Synthetic Sequence
ctattaggcc

SEQ ID NO: 9532 - DNA, 10 bp, Artificial Sequence
  Synthetic Sequence
atcatcgatg

SEQ ID NO: 9533 - DNA, 10 bp, Artificial Sequence
  Synthetic Sequence
atatggtgcg

SEQ ID NO: 9534 - DNA, 10 bp, Artificial Sequence
  Synthetic Sequence
atcgtacggt

SEQ ID NO: 9535 - DNA, 10 bp, Artificial Sequence
  Synthetic Sequence
gtggctccga

SEQ ID NO: 9536 - DNA, 10 bp, Artificial Sequence
  Synthetic Sequence
gtggccttcg

SEQ ID NO: 9537 - DNA, 10 bp, Artificial Sequence
  Synthetic Sequence
gacaacacct

SEQ ID NO: 9538 - DNA, 10 bp, Artificial Sequence
  Synthetic Sequence
aatacgactg

SEQ ID NO: 9539 - DNA, 10 bp, Artificial Sequence
  Synthetic Sequence
gcaacccatc

SEQ ID NO: 9540 - DNA, 10 bp, Artificial Sequence
  Synthetic Sequence
ggcccatgaa

SEQ ID NO: 9541 - DNA, 10 bp, Artificial Sequence
  Synthetic Sequence
tcagatattc

SEQ ID NO: 9542 - DNA, 10 bp, Artificial Sequence
  Synthetic Sequence
attccaagag

SEQ ID NO: 9543 - DNA, 10 bp, Artificial Sequence
  Synthetic Sequence
cgtgactctc

SEQ ID NO: 9544 - DNA, 10 bp, Artificial Sequence
  Synthetic Sequence
ttctggagct

SEQ ID NO: 9545 - DNA, 10 bp, Artificial Sequence
  Synthetic Sequence
atgcgctgtg

SEQ ID NO: 9546 - DNA, 10 bp, Artificial Sequence
  Synthetic Sequence
gcggacgtag

SEQ ID NO: 9547 - DNA, 10 bp, Artificial Sequence
  Synthetic Sequence
ccgggcgaaa

SEQ ID NO: 9548 - DNA, 10 bp, Artificial Sequence
  Synthetic Sequence
ggtaatatat

SEQ ID NO: 9549 - DNA, 10 bp, Artificial Sequence
  Synthetic Sequence
tcccacccgt

SEQ ID NO: 9550 - DNA, 10 bp, Artificial Sequence
  Synthetic Sequence
ctcggtacag

SEQ ID NO: 9551 - DNA, 10 bp, Artificial Sequence
  Synthetic Sequence
tgcccaccaa

SEQ ID NO: 9552 - DNA, 10 bp, Artificial Sequence
  Synthetic Sequence
ggcagagatc

SEQ ID NO: 9553 - DNA, 10 bp, Artificial Sequence
  Synthetic Sequence
gttagcccgg

SEQ ID NO: 9554 - DNA, 10 bp, Artificial Sequence
  Synthetic Sequence
cggtcggctt

SEQ ID NO: 9555 - DNA, 10 bp, Artificial Sequence
  Synthetic Sequence
gaatagtcga

SEQ ID NO: 9556 - DNA, 10 bp, Artificial Sequence
  Synthetic Sequence
ttgcaagtac

SEQ ID NO: 9557 - DNA, 10 bp, Artificial Sequence
  Synthetic Sequence
cataactcgc

SEQ ID NO: 9558 - DNA, 10 bp, Artificial Sequence
  Synthetic Sequence
gctggactaa

SEQ ID NO: 9559 - DNA, 10 bp, Artificial Sequence
  Synthetic Sequence
gcgtcgtatt

SEQ ID NO: 9560 - DNA, 10 bp, Artificial Sequence
  Synthetic Sequence
aacccattta

SEQ ID NO: 9561 - DNA, 10 bp, Artificial Sequence
  Synthetic Sequence
tagaggccat

SEQ ID NO: 9562 - DNA, 10 bp, Artificial Sequence
  Synthetic Sequence
gctcgcttat

SEQ ID NO: 9563 - DNA, 10 bp, Artificial Sequence
  Synthetic Sequence
ataaagcagt

SEQ ID NO: 9564 - DNA, 10 bp, Artificial Sequence
  Synthetic Sequence
tctcatgagg

SEQ ID NO: 9565 - DNA, 10 bp, Artificial Sequence
  Synthetic Sequence
gcaccgctag

SEQ ID NO: 9566 - DNA, 10 bp, Artificial Sequence
  Synthetic Sequence
cgagggctgt

SEQ ID NO: 9567 - DNA, 10 bp, Artificial Sequence
  Synthetic Sequence
taaagggaca

SEQ ID NO: 9568 - DNA, 10 bp, Artificial Sequence
  Synthetic Sequence
tggagtagga

SEQ ID NO: 9569 - DNA, 10 bp, Artificial Sequence
  Synthetic Sequence
tgtacgactt

SEQ ID NO: 9570 - DNA, 10 bp, Artificial Sequence
  Synthetic Sequence
catggcgcac

SEQ ID NO: 9571 - DNA, 10 bp, Artificial Sequence
  Synthetic Sequence
agtcaggccc

SEQ ID NO: 9572 - DNA, 10 bp, Artificial Sequence
  Synthetic Sequence
acatcgcgcc

SEQ ID NO: 9573 - DNA, 10 bp, Artificial Sequence
  Synthetic Sequence
taccgttcca

SEQ ID NO: 9574 - DNA, 10 bp, Artificial Sequence
  Synthetic Sequence
tgccaacgtt

SEQ ID NO: 9575 - DNA, 10 bp, Artificial Sequence
  Synthetic Sequence
tccgagcact

SEQ ID NO: 9576 - DNA, 10 bp, Artificial Sequence
  Synthetic Sequence
tagtctcttc

SEQ ID NO: 9577 - DNA, 10 bp, Artificial Sequence
  Synthetic Sequence
tgagggtagc

SEQ ID NO: 9578 - DNA, 10 bp, Artificial Sequence
  Synthetic Sequence
cttcagtcac

SEQ ID NO: 9579 - DNA, 10 bp, Artificial Sequence
  Synthetic Sequence
tgcatccgct

SEQ ID NO: 9580 - DNA, 10 bp, Artificial Sequence
  Synthetic Sequence
acgcaatgat

SEQ ID NO: 9581 - DNA, 10 bp, Artificial Sequence
  Synthetic Sequence
gcaatagaga

SEQ ID NO: 9582 - DNA, 10 bp, Artificial Sequence
  Synthetic Sequence
gccggtcttg

SEQ ID NO: 9583 - DNA, 10 bp, Artificial Sequence
  Synthetic Sequence
ggaaattcaa

SEQ ID NO: 9584 - DNA, 10 bp, Artificial Sequence
  Synthetic Sequence
caacgtttgg

SEQ ID NO: 9585 - DNA, 10 bp, Artificial Sequence
  Synthetic Sequence
tagtgttctg

SEQ ID NO: 9586 - DNA, 10 bp, Artificial Sequence
  Synthetic Sequence
tttgtgattc

SEQ ID NO: 9587 - DNA, 10 bp, Artificial Sequence
  Synthetic Sequence
gccggatcac

SEQ ID NO: 9588 - DNA, 10 bp, Artificial Sequence
  Synthetic Sequence
gccacatgtg

SEQ ID NO: 9589 - DNA, 10 bp, Artificial Sequence
  Synthetic Sequence
aagaacattg

SEQ ID NO: 9590 - DNA, 10 bp, Artificial Sequence
  Synthetic Sequence
cttgccgata

SEQ ID NO: 9591 - DNA, 10 bp, Artificial Sequence
  Synthetic Sequence
ggacaaggga

SEQ ID NO: 9592 - DNA, 10 bp, Artificial Sequence
  Synthetic Sequence
agctaccttt

SEQ ID NO: 9593 - DNA, 10 bp, Artificial Sequence
  Synthetic Sequence
tcatgcgcga

SEQ ID NO: 9594 - DNA, 10 bp, Artificial Sequence
  Synthetic Sequence
gccaactcgc

SEQ ID NO: 9595 - DNA, 10 bp, Artificial Sequence
  Synthetic Sequence
atgcttacgt

SEQ ID NO: 9596 - DNA, 10 bp, Artificial Sequence
  Synthetic Sequence
agagagagcg

SEQ ID NO: 9597 - DNA, 10 bp, Artificial Sequence
  Synthetic Sequence
gagcagggct

SEQ ID NO: 9598 - DNA, 10 bp, Artificial Sequence
  Synthetic Sequence
gctctgtcct

SEQ ID NO: 9599 - DNA, 10 bp, Artificial Sequence
  Synthetic Sequence
tggtacgcgg

SEQ ID NO: 9600 - DNA, 10 bp, Artificial Sequence
  Synthetic Sequence
ctacaaagca

SEQ ID NO: 9601 - DNA, 10 bp, Artificial Sequence
  Synthetic Sequence
gtcgcaaggg

SEQ ID NO: 9602 - DNA, 10 bp, Artificial Sequence
  Synthetic Sequence
tctaatctat

SEQ ID NO: 9603 - DNA, 10 bp, Artificial Sequence
  Synthetic Sequence
ccaataagat

SEQ ID NO: 9604 - DNA, 10 bp, Artificial Sequence
  Synthetic Sequence
ggacgaaacc

SEQ ID NO: 9605 - DNA, 10 bp, Artificial Sequence
  Synthetic Sequence
caccgcgaca

SEQ ID NO: 9606 - DNA, 10 bp, Artificial Sequence
  Synthetic Sequence
cctctagcca

SEQ ID NO: 9607 - DNA, 10 bp, Artificial Sequence
  Synthetic Sequence
ccgactatgc

SEQ ID NO: 9608 - DNA, 10 bp, Artificial Sequence
  Synthetic Sequence
gagaaaccca

SEQ ID NO: 9609 - DNA, 10 bp, Artificial Sequence
  Synthetic Sequence
aaggatatga

SEQ ID NO: 9610 - DNA, 10 bp, Artificial Sequence
  Synthetic Sequence
atcgccatca

SEQ ID NO: 9611 - DNA, 10 bp, Artificial Sequence
  Synthetic Sequence
tgcaccagga

SEQ ID NO: 9612 - DNA, 10 bp, Artificial Sequence
  Synthetic Sequence
gtgccgtgag

SEQ ID NO: 9613 - DNA, 10 bp, Artificial Sequence
  Synthetic Sequence
atactcccgc

SEQ ID NO: 9614 - DNA, 10 bp, Artificial Sequence
  Synthetic Sequence
ggtatgatct

SEQ ID NO: 9615 - DNA, 10 bp, Artificial Sequence
  Synthetic Sequence
ctgagttgta

SEQ ID NO: 9616 - DNA, 10 bp, Artificial Sequence
  Synthetic Sequence
tgctcaatgg

SEQ ID NO: 9617 - DNA, 10 bp, Artificial Sequence
  Synthetic Sequence
agttatatgg

SEQ ID NO: 9618 - DNA, 10 bp, Artificial Sequence
  Synthetic Sequence
ttggatgggc

SEQ ID NO: 9619 - DNA, 10 bp, Artificial Sequence
  Synthetic Sequence
ctaggcaacg

SEQ ID NO: 9620 - DNA, 10 bp, Artificial Sequence
  Synthetic Sequence
ccattctcca

SEQ ID NO: 9621 - DNA, 10 bp, Artificial Sequence
  Synthetic Sequence
aacctttggg

SEQ ID NO: 9622 - DNA, 10 bp, Artificial Sequence
  Synthetic Sequence
gtttgttgat

SEQ ID NO: 9623 - DNA, 10 bp, Artificial Sequence
  Synthetic Sequence
ggcatcgagg

SEQ ID NO: 9624 - DNA, 10 bp, Artificial Sequence
  Synthetic Sequence
cgtactaagc

SEQ ID NO: 9625 - DNA, 10 bp, Artificial Sequence
  Synthetic Sequence
acaagagggc

SEQ ID NO: 9626 - DNA, 10 bp, Artificial Sequence
  Synthetic Sequence
agcttgccct

SEQ ID NO: 9627 - DNA, 10 bp, Artificial Sequence
  Synthetic Sequence
tatatcgggt

SEQ ID NO: 9628 - DNA, 10 bp, Artificial Sequence
  Synthetic Sequence
ttcccaatta

SEQ ID NO: 9629 - DNA, 10 bp, Artificial Sequence
  Synthetic Sequence
atagttacaa

SEQ ID NO: 9630 - DNA, 10 bp, Artificial Sequence
  Synthetic Sequence
atgccggaag

SEQ ID NO: 9631 - DNA, 10 bp, Artificial Sequence
  Synthetic Sequence
tgaccggcgt

SEQ ID NO: 9632 - DNA, 10 bp, Artificial Sequence
  Synthetic Sequence
gggtaagacg

SEQ ID NO: 9633 - DNA, 10 bp, Artificial Sequence
  Synthetic Sequence
gcgctttgcc

SEQ ID NO: 9634 - DNA, 10 bp, Artificial Sequence
  Synthetic Sequence
accctacgaa

SEQ ID NO: 9635 - DNA, 10 bp, Artificial Sequence
  Synthetic Sequence
acctggtccg

SEQ ID NO: 9636 - DNA, 10 bp, Artificial Sequence
  Synthetic Sequence
agctgaacac

SEQ ID NO: 9637 - DNA, 10 bp, Artificial Sequence
  Synthetic Sequence
cggtaccagg

SEQ ID NO: 9638 - DNA, 10 bp, Artificial Sequence
  Synthetic Sequence
acccgttgca

SEQ ID NO: 9639 - DNA, 10 bp, Artificial Sequence
  Synthetic Sequence
taagaagaaa

SEQ ID NO: 9640 - DNA, 10 bp, Artificial Sequence
  Synthetic Sequence
tacataagac

SEQ ID NO: 9641 - DNA, 10 bp, Artificial Sequence
  Synthetic Sequence
gagtgagata

SEQ ID NO: 9642 - DNA, 10 bp, Artificial Sequence
  Synthetic Sequence
gaccgtggct

SEQ ID NO: 9643 - DNA, 10 bp, Artificial Sequence
  Synthetic Sequence
ttaaggacgt

SEQ ID NO: 9644 - DNA, 10 bp, Artificial Sequence
  Synthetic Sequence
ctgagaagat

SEQ ID NO: 9645 - DNA, 10 bp, Artificial Sequence
  Synthetic Sequence
agtatcaccc

SEQ ID NO: 9646 - DNA, 10 bp, Artificial Sequence
  Synthetic Sequence
tcgtcccaag

SEQ ID NO: 9647 - DNA, 10 bp, Artificial Sequence
  Synthetic Sequence
tgctcaagac

SEQ ID NO: 9648 - DNA, 10 bp, Artificial Sequence
  Synthetic Sequence
accgtatata

SEQ ID NO: 9649 - DNA, 10 bp, Artificial Sequence
  Synthetic Sequence
tgtgccggct

SEQ ID NO: 9650 - DNA, 10 bp, Artificial Sequence
  Synthetic Sequence
tgtcaagagc

SEQ ID NO: 9651 - DNA, 10 bp, Artificial Sequence
  Synthetic Sequence
accggcgaca

SEQ ID NO: 9652 - DNA, 10 bp, Artificial Sequence
  Synthetic Sequence
taccttgcta

SEQ ID NO: 9653 - DNA, 10 bp, Artificial Sequence
  Synthetic Sequence
tgaccaacga

SEQ ID NO: 9654 - DNA, 10 bp, Artificial Sequence
  Synthetic Sequence
tatgaggtac

SEQ ID NO: 9655 - DNA, 10 bp, Artificial Sequence
  Synthetic Sequence
ttaacagtct

SEQ ID NO: 9656 - DNA, 10 bp, Artificial Sequence
  Synthetic Sequence
gacagtctga

SEQ ID NO: 9657 - DNA, 10 bp, Artificial Sequence
  Synthetic Sequence
gactaaattc

SEQ ID NO: 9658 - DNA, 10 bp, Artificial Sequence
  Synthetic Sequence
actattcgtt

SEQ ID NO: 9659 - DNA, 10 bp, Artificial Sequence
  Synthetic Sequence
tccgctgctc

SEQ ID NO: 9660 - DNA, 10 bp, Artificial Sequence
  Synthetic Sequence
acatttgaac

SEQ ID NO: 9661 - DNA, 10 bp, Artificial Sequence
  Synthetic Sequence
gggattattc

SEQ ID NO: 9662 - DNA, 10 bp, Artificial Sequence
  Synthetic Sequence
ggctctcagc

SEQ ID NO: 9663 - DNA, 10 bp, Artificial Sequence
  Synthetic Sequence
aatagctggg

SEQ ID NO: 9664 - DNA, 10 bp, Artificial Sequence
  Synthetic Sequence
tttgaatttg

SEQ ID NO: 9665 - DNA, 10 bp, Artificial Sequence
  Synthetic Sequence
ctgaggacgc

SEQ ID NO: 9666 - DNA, 10 bp, Artificial Sequence
  Synthetic Sequence
ctctccttgg

SEQ ID NO: 9667 - DNA, 10 bp, Artificial Sequence
  Synthetic Sequence
ccgtccaacg

SEQ ID NO: 9668 - DNA, 10 bp, Artificial Sequence
  Synthetic Sequence
aaccatctga

SEQ ID NO: 9669 - DNA, 10 bp, Artificial Sequence
  Synthetic Sequence
aacgcccatt

SEQ ID NO: 9670 - DNA, 10 bp, Artificial Sequence
  Synthetic Sequence
tttgggaaag

SEQ ID NO: 9671 - DNA, 10 bp, Artificial Sequence
  Synthetic Sequence
tttgttcgga

SEQ ID NO: 9672 - DNA, 10 bp, Artificial Sequence
  Synthetic Sequence
aatggcacgg

SEQ ID NO: 9673 - DNA, 10 bp, Artificial Sequence
  Synthetic Sequence
ccctaggtac

SEQ ID NO: 9674 - DNA, 10 bp, Artificial Sequence
  Synthetic Sequence
tacttaaagc

SEQ ID NO: 9675 - DNA, 10 bp, Artificial Sequence
  Synthetic Sequence
cagtctttat

SEQ ID NO: 9676 - DNA, 10 bp, Artificial Sequence
  Synthetic Sequence
tagaataaga

SEQ ID NO: 9677 - DNA, 10 bp, Artificial Sequence
  Synthetic Sequence
atgcttcgct

SEQ ID NO: 9678 - DNA, 10 bp, Artificial Sequence
  Synthetic Sequence
atgtccgagt

SEQ ID NO: 9679 - DNA, 10 bp, Artificial Sequence
  Synthetic Sequence
ctccgttaag

SEQ ID NO: 9680 - DNA, 10 bp, Artificial Sequence
  Synthetic Sequence
ttgagaacaa

SEQ ID NO: 9681 - DNA, 10 bp, Artificial Sequence
  Synthetic Sequence
gcactatcag

SEQ ID NO: 9682 - DNA, 10 bp, Artificial Sequence
  Synthetic Sequence
tggcgaggct

SEQ ID NO: 9683 - DNA, 10 bp, Artificial Sequence
  Synthetic Sequence
aaccctaaac

SEQ ID NO: 9684 - DNA, 10 bp, Artificial Sequence
  Synthetic Sequence
gcaactaatg

SEQ ID NO: 9685 - DNA, 10 bp, Artificial Sequence
  Synthetic Sequence
ctacattcgt

SEQ ID NO: 9686 - DNA, 10 bp, Artificial Sequence
  Synthetic Sequence
caacagcctg

SEQ ID NO: 9687 - DNA, 10 bp, Artificial Sequence
  Synthetic Sequence
cagaatatcc

SEQ ID NO: 9688 - DNA, 10 bp, Artificial Sequence
  Synthetic Sequence
tcatggctac

SEQ ID NO: 9689 - DNA, 10 bp, Artificial Sequence
  Synthetic Sequence
ccttggttgc

SEQ ID NO: 9690 - DNA, 10 bp, Artificial Sequence
  Synthetic Sequence
ggatcacctg

SEQ ID NO: 9691 - DNA, 10 bp, Artificial Sequence
  Synthetic Sequence
gaataataag

SEQ ID NO: 9692 - DNA, 10 bp, Artificial Sequence
  Synthetic Sequence
caactgaagc

SEQ ID NO: 9693 - DNA, 10 bp, Artificial Sequence
  Synthetic Sequence
aagaggtagt

SEQ ID NO: 9694 - DNA, 10 bp, Artificial Sequence
  Synthetic Sequence
caagtcagaa

SEQ ID NO: 9695 - DNA, 10 bp, Artificial Sequence
  Synthetic Sequence
gtgcttcacc

SEQ ID NO: 9696 - DNA, 10 bp, Artificial Sequence
  Synthetic Sequence
tgttagagcg

SEQ ID NO: 9697 - DNA, 10 bp, Artificial Sequence
  Synthetic Sequence
ggcagggtca

SEQ ID NO: 9698 - DNA, 10 bp, Artificial Sequence
  Synthetic Sequence
gcggtctcct

SEQ ID NO: 9699 - DNA, 10 bp, Artificial Sequence
  Synthetic Sequence
aaagtactat

SEQ ID NO: 9700 - DNA, 10 bp, Artificial Sequence
  Synthetic Sequence
agcttagcag

SEQ ID NO: 9701 - DNA, 10 bp, Artificial Sequence
  Synthetic Sequence
attaagaggg

SEQ ID NO: 9702 - DNA, 10 bp, Artificial Sequence
  Synthetic Sequence
agaagcctgt

SEQ ID NO: 9703 - DNA, 10 bp, Artificial Sequence
  Synthetic Sequence
cacacgctct

SEQ ID NO: 9704 - DNA, 10 bp, Artificial Sequence
  Synthetic Sequence
tatactcctc

SEQ ID NO: 9705 - DNA, 10 bp, Artificial Sequence
  Synthetic Sequence
cgtagttggg

SEQ ID NO: 9706 - DNA, 10 bp, Artificial Sequence
  Synthetic Sequence
gctgtggaag

SEQ ID NO: 9707 - DNA, 10 bp, Artificial Sequence
  Synthetic Sequence
tccggagacg

SEQ ID NO: 9708 - DNA, 10 bp, Artificial Sequence
  Synthetic Sequence
gccatgcatg

SEQ ID NO: 9709 - DNA, 10 bp, Artificial Sequence
  Synthetic Sequence
tagataggag

SEQ ID NO: 9710 - DNA, 10 bp, Artificial Sequence
  Synthetic Sequence
gggtatggca

SEQ ID NO: 9711 - DNA, 10 bp, Artificial Sequence
  Synthetic Sequence
agactacaaa

SEQ ID NO: 9712 - DNA, 10 bp, Artificial Sequence
  Synthetic Sequence
ctgttcctac

SEQ ID NO: 9713 - DNA, 10 bp, Artificial Sequence
  Synthetic Sequence
atctgttata

SEQ ID NO: 9714 - DNA, 10 bp, Artificial Sequence
  Synthetic Sequence
tagtccgatt

SEQ ID NO: 9715 - DNA, 10 bp, Artificial Sequence
  Synthetic Sequence
gcttgaattt

SEQ ID NO: 9716 - DNA, 10 bp, Artificial Sequence
  Synthetic Sequence
tttacgtcag

SEQ ID NO: 9717 - DNA, 10 bp, Artificial Sequence
  Synthetic Sequence
aaggttgacc

SEQ ID NO: 9718 - DNA, 10 bp, Artificial Sequence
  Synthetic Sequence
agttcatgga

SEQ ID NO: 9719 - DNA, 10 bp, Artificial Sequence
  Synthetic Sequence
ttgctacatt

SEQ ID NO: 9720 - DNA, 10 bp, Artificial Sequence
  Synthetic Sequence
gatcagacgg

SEQ ID NO: 9721 - DNA, 10 bp, Artificial Sequence
  Synthetic Sequence
taagggcaat

SEQ ID NO: 9722 - DNA, 10 bp, Artificial Sequence
  Synthetic Sequence
cttccagtac

SEQ ID NO: 9723 - DNA, 10 bp, Artificial Sequence
  Synthetic Sequence
ctttcgctgc

SEQ ID NO: 9724 - DNA, 10 bp, Artificial Sequence
  Synthetic Sequence
atggctgtga

SEQ ID NO: 9725 - DNA, 10 bp, Artificial Sequence
  Synthetic Sequence
ccgctctctc

SEQ ID NO: 9726 - DNA, 10 bp, Artificial Sequence
  Synthetic Sequence
gtacgacatc

SEQ ID NO: 9727 - DNA, 10 bp, Artificial Sequence
  Synthetic Sequence
taggcacggg

SEQ ID NO: 9728 - DNA, 10 bp, Artificial Sequence
  Synthetic Sequence
ggagcgatcc

SEQ ID NO: 9729 - DNA, 10 bp, Artificial Sequence
  Synthetic Sequence
tacgggacat

SEQ ID NO: 9730 - DNA, 10 bp, Artificial Sequence
  Synthetic Sequence
ccctagctca

SEQ ID NO: 9731 - DNA, 10 bp, Artificial Sequence
  Synthetic Sequence
tatctctcgc

SEQ ID NO: 9732 - DNA, 10 bp, Artificial Sequence
  Synthetic Sequence
caatcgaact

SEQ ID NO: 9733 - DNA, 10 bp, Artificial Sequence
  Synthetic Sequence
gttaggtata

SEQ ID NO: 9734 - DNA, 10 bp, Artificial Sequence
  Synthetic Sequence
atccatcagc

SEQ ID NO: 9735 - DNA, 10 bp, Artificial Sequence
  Synthetic Sequence
agattgcata

SEQ ID NO: 9736 - DNA, 10 bp, Artificial Sequence
  Synthetic Sequence
cgccgaggat

SEQ ID NO: 9737 - DNA, 10 bp, Artificial Sequence
  Synthetic Sequence
caacggtggt

SEQ ID NO: 9738 - DNA, 10 bp, Artificial Sequence
  Synthetic Sequence
acctcggtcc

SEQ ID NO: 9739 - DNA, 10 bp, Artificial Sequence
  Synthetic Sequence
aggatatttc

SEQ ID NO: 9740 - DNA, 10 bp, Artificial Sequence
  Synthetic Sequence
ttatctaaat

SEQ ID NO: 9741 - DNA, 10 bp, Artificial Sequence
  Synthetic Sequence
ctatacccta

SEQ ID NO: 9742 - DNA, 10 bp, Artificial Sequence
  Synthetic Sequence
tacacctgaa

SEQ ID NO: 9743 - DNA, 10 bp, Artificial Sequence
  Synthetic Sequence
acccgggatt

SEQ ID NO: 9744 - DNA, 10 bp, Artificial Sequence
  Synthetic Sequence
ttagtcccgg

SEQ ID NO: 9745 - DNA, 10 bp, Artificial Sequence
  Synthetic Sequence
ttgctcggct

SEQ ID NO: 9746 - DNA, 10 bp, Artificial Sequence
  Synthetic Sequence
ttgataatat

SEQ ID NO: 9747 - DNA, 10 bp, Artificial Sequence
  Synthetic Sequence
agcgtctctt

SEQ ID NO: 9748 - DNA, 10 bp, Artificial Sequence
  Synthetic Sequence
cgcttgttta

SEQ ID NO: 9749 - DNA, 10 bp, Artificial Sequence
  Synthetic Sequence
aaccggacta

SEQ ID NO: 9750 - DNA, 10 bp, Artificial Sequence
  Synthetic Sequence
gccagaatag

SEQ ID NO: 9751 - DNA, 10 bp, Artificial Sequence
  Synthetic Sequence
gatcgcgtac

SEQ ID NO: 9752 - DNA, 10 bp, Artificial Sequence
  Synthetic Sequence
gtaacggatc

SEQ ID NO: 9753 - DNA, 10 bp, Artificial Sequence
  Synthetic Sequence
agaacccata

SEQ ID NO: 9754 - DNA, 10 bp, Artificial Sequence
  Synthetic Sequence
cgcgttaacg

SEQ ID NO: 9755 - DNA, 10 bp, Artificial Sequence
  Synthetic Sequence
tccaaagcca

SEQ ID NO: 9756 - DNA, 10 bp, Artificial Sequence
  Synthetic Sequence
ccgaaccgtt

SEQ ID NO: 9757 - DNA, 10 bp, Artificial Sequence
  Synthetic Sequence
aagtcacgcc

SEQ ID NO: 9758 - DNA, 10 bp, Artificial Sequence
  Synthetic Sequence
cggtcagtgg

SEQ ID NO: 9759 - DNA, 10 bp, Artificial Sequence
  Synthetic Sequence
ccgactagct

SEQ ID NO: 9760 - DNA, 10 bp, Artificial Sequence
  Synthetic Sequence
cctccggctt

SEQ ID NO: 9761 - DNA, 10 bp, Artificial Sequence
  Synthetic Sequence
ctgtctagtt

SEQ ID NO: 9762 - DNA, 10 bp, Artificial Sequence
  Synthetic Sequence
taaggttgct

SEQ ID NO: 9763 - DNA, 10 bp, Artificial Sequence
  Synthetic Sequence
acctgcgaat

SEQ ID NO: 9764 - DNA, 10 bp, Artificial Sequence
  Synthetic Sequence
gcgcaaatac

SEQ ID NO: 9765 - DNA, 10 bp, Artificial Sequence
  Synthetic Sequence
gataggacta

SEQ ID NO: 9766 - DNA, 10 bp, Artificial Sequence
  Synthetic Sequence
ccggttccct

SEQ ID NO: 9767 - DNA, 10 bp, Artificial Sequence
  Synthetic Sequence
gctaaccctt

SEQ ID NO: 9768 - DNA, 10 bp, Artificial Sequence
  Synthetic Sequence
gatgtagcct

SEQ ID NO: 9769 - DNA, 10 bp, Artificial Sequence
  Synthetic Sequence
tcccatgccg

SEQ ID NO: 9770 - DNA, 10 bp, Artificial Sequence
  Synthetic Sequence
ccgagttagt

SEQ ID NO: 9771 - DNA, 10 bp, Artificial Sequence
  Synthetic Sequence
caaagctgag

SEQ ID NO: 9772 - DNA, 10 bp, Artificial Sequence
  Synthetic Sequence
agtgtcaatc

SEQ ID NO: 9773 - DNA, 10 bp, Artificial Sequence
  Synthetic Sequence
tccaccttga

SEQ ID NO: 9774 - DNA, 10 bp, Artificial Sequence
  Synthetic Sequence
tcggtcagcc

SEQ ID NO: 9775 - DNA, 10 bp, Artificial Sequence
  Synthetic Sequence
cgtatataaa

SEQ ID NO: 9776 - DNA, 10 bp, Artificial Sequence
  Synthetic Sequence
caatcggagc

SEQ ID NO: 9777 - DNA, 10 bp, Artificial Sequence
  Synthetic Sequence
ggttatttac

SEQ ID NO: 9778 - DNA, 10 bp, Artificial Sequence
  Synthetic Sequence
gtcagtaggt

SEQ ID NO: 9779 - DNA, 10 bp, Artificial Sequence
  Synthetic Sequence
ttcgcaggtg

SEQ ID NO: 9780 - DNA, 10 bp, Artificial Sequence
  Synthetic Sequence
tgagcaggat

SEQ ID NO: 9781 - DNA, 10 bp, Artificial Sequence
  Synthetic Sequence
ttaaatgcct

SEQ ID NO: 9782 - DNA, 10 bp, Artificial Sequence
  Synthetic Sequence
aaagcagacg

SEQ ID NO: 9783 - DNA, 10 bp, Artificial Sequence
  Synthetic Sequence
attataagaa

SEQ ID NO: 9784 - DNA, 10 bp, Artificial Sequence
  Synthetic Sequence
ttcgtctgat

SEQ ID NO: 9785 - DNA, 10 bp, Artificial Sequence
  Synthetic Sequence
cccgtccctt

SEQ ID NO: 9786 - DNA, 10 bp, Artificial Sequence
  Synthetic Sequence
ccggataact

SEQ ID NO: 9787 - DNA, 10 bp, Artificial Sequence
  Synthetic Sequence
gtcgagagtt

SEQ ID NO: 9788 - DNA, 10 bp, Artificial Sequence
  Synthetic Sequence
cttacggtat

SEQ ID NO: 9789 - DNA, 10 bp, Artificial Sequence
  Synthetic Sequence
atcctcttag

SEQ ID NO: 9790 - DNA, 10 bp, Artificial Sequence
  Synthetic Sequence
tgcgcaatct

SEQ ID NO: 9791 - DNA, 10 bp, Artificial Sequence
  Synthetic Sequence
ctaggtgtaa

SEQ ID NO: 9792 - DNA, 10 bp, Artificial Sequence
  Synthetic Sequence
catttagtac

SEQ ID NO: 9793 - DNA, 10 bp, Artificial Sequence
  Synthetic Sequence
aggttaagga

SEQ ID NO: 9794 - DNA, 10 bp, Artificial Sequence
  Synthetic Sequence
cataagtcct

SEQ ID NO: 9795 - DNA, 10 bp, Artificial Sequence
  Synthetic Sequence
cattgtcaga

SEQ ID NO: 9796 - DNA, 10 bp, Artificial Sequence
  Synthetic Sequence
gttccaccgt

SEQ ID NO: 9797 - DNA, 10 bp, Artificial Sequence
  Synthetic Sequence
ttgtcattct

SEQ ID NO: 9798 - DNA, 10 bp, Artificial Sequence
  Synthetic Sequence
gacatcacga

SEQ ID NO: 9799 - DNA, 10 bp, Artificial Sequence
  Synthetic Sequence
taagctgaag

SEQ ID NO: 9800 - DNA, 10 bp, Artificial Sequence
  Synthetic Sequence
tggaagtatc

SEQ ID NO: 9801 - DNA, 10 bp, Artificial Sequence
  Synthetic Sequence
gtgagcagcc

SEQ ID NO: 9802 - DNA, 10 bp, Artificial Sequence
  Synthetic Sequence
cttgcctcac

SEQ ID NO: 9803 - DNA, 10 bp, Artificial Sequence
  Synthetic Sequence
cataagccga

SEQ ID NO: 9804 - DNA, 10 bp, Artificial Sequence
  Synthetic Sequence
tctcccggga

SEQ ID NO: 9805 - DNA, 10 bp, Artificial Sequence
  Synthetic Sequence
tcagcgggtc

SEQ ID NO: 9806 - DNA, 10 bp, Artificial Sequence
  Synthetic Sequence
ttaggtacga

SEQ ID NO: 9807 - DNA, 10 bp, Artificial Sequence
  Synthetic Sequence
caaccgcaaa

SEQ ID NO: 9808 - DNA, 10 bp, Artificial Sequence
  Synthetic Sequence
cggaagagga

SEQ ID NO: 9809 - DNA, 10 bp, Artificial Sequence
  Synthetic Sequence
tcgccgtcct

SEQ ID NO: 9810 - DNA, 10 bp, Artificial Sequence
  Synthetic Sequence
gtgttctacc

SEQ ID NO: 9811 - DNA, 10 bp, Artificial Sequence
  Synthetic Sequence
gccattccca

SEQ ID NO: 9812 - DNA, 10 bp, Artificial Sequence
  Synthetic Sequence
gcaagtttgt

SEQ ID NO: 9813 - DNA, 10 bp, Artificial Sequence
  Synthetic Sequence
tcgcgcttga

SEQ ID NO: 9814 - DNA, 10 bp, Artificial Sequence
  Synthetic Sequence
ttggatgttt

SEQ ID NO: 9815 - DNA, 10 bp, Artificial Sequence
  Synthetic Sequence
atctgacagt

SEQ ID NO: 9816 - DNA, 10 bp, Artificial Sequence
  Synthetic Sequence
gaacatttcg

SEQ ID NO: 9817 - DNA, 10 bp, Artificial Sequence
  Synthetic Sequence
agcgacacgc

SEQ ID NO: 9818 - DNA, 10 bp, Artificial Sequence
  Synthetic Sequence
ccggacggat

SEQ ID NO: 9819 - DNA, 10 bp, Artificial Sequence
  Synthetic Sequence
gatagcaact

SEQ ID NO: 9820 - DNA, 10 bp, Artificial Sequence
  Synthetic Sequence
acgggaatgt

SEQ ID NO: 9821 - DNA, 10 bp, Artificial Sequence
  Synthetic Sequence
cgacgatctg

SEQ ID NO: 9822 - DNA, 10 bp, Artificial Sequence
  Synthetic Sequence
ggaccgtact

SEQ ID NO: 9823 - DNA, 10 bp, Artificial Sequence
  Synthetic Sequence
cctacagtga

SEQ ID NO: 9824 - DNA, 10 bp, Artificial Sequence
  Synthetic Sequence
gaatcaacat

SEQ ID NO: 9825 - DNA, 10 bp, Artificial Sequence
  Synthetic Sequence
atgttgtttg

SEQ ID NO: 9826 - DNA, 10 bp, Artificial Sequence
  Synthetic Sequence
ttactaccca

SEQ ID NO: 9827 - DNA, 10 bp, Artificial Sequence
  Synthetic Sequence
tgggccttgg

SEQ ID NO: 9828 - DNA, 10 bp, Artificial Sequence
  Synthetic Sequence
ttacattgta

SEQ ID NO: 9829 - DNA, 10 bp, Artificial Sequence
  Synthetic Sequence
gcatcaggtc

SEQ ID NO: 9830 - DNA, 10 bp, Artificial Sequence
  Synthetic Sequence
ggtcttcctg

SEQ ID NO: 9831 - DNA, 10 bp, Artificial Sequence
  Synthetic Sequence
tcaagtactg

SEQ ID NO: 9832 - DNA, 10 bp, Artificial Sequence
  Synthetic Sequence
atgaccagct

SEQ ID NO: 9833 - DNA, 10 bp, Artificial Sequence
  Synthetic Sequence
gtctgggcac

SEQ ID NO: 9834 - DNA, 10 bp, Artificial Sequence
  Synthetic Sequence
ctcaccaacc

SEQ ID NO: 9835 - DNA, 10 bp, Artificial Sequence
  Synthetic Sequence
ggatctgtta

SEQ ID NO: 9836 - DNA, 10 bp, Artificial Sequence
  Synthetic Sequence
gtgcccgatt

SEQ ID NO: 9837 - DNA, 10 bp, Artificial Sequence
  Synthetic Sequence
agccgtcttt

SEQ ID NO: 9838 - DNA, 10 bp, Artificial Sequence
  Synthetic Sequence
catgcataca

SEQ ID NO: 9839 - DNA, 10 bp, Artificial Sequence
  Synthetic Sequence
tgttggtgtc

SEQ ID NO: 9840 - DNA, 10 bp, Artificial Sequence
  Synthetic Sequence
atttagtgct

SEQ ID NO: 9841 - DNA, 10 bp, Artificial Sequence
  Synthetic Sequence
tcagcggcag

SEQ ID NO: 9842 - DNA, 10 bp, Artificial Sequence
  Synthetic Sequence
ctgtcttatc

SEQ ID NO: 9843 - DNA, 10 bp, Artificial Sequence
  Synthetic Sequence
cattcggctg

SEQ ID NO: 9844 - DNA, 10 bp, Artificial Sequence
  Synthetic Sequence
ggtagcaccg

SEQ ID NO: 9845 - DNA, 10 bp, Artificial Sequence
  Synthetic Sequence
tctacaagcg

SEQ ID NO: 9846 - DNA, 10 bp, Artificial Sequence
  Synthetic Sequence
ttgtcaggat

SEQ ID NO: 9847 - DNA, 10 bp, Artificial Sequence
  Synthetic Sequence
cacgctccca

SEQ ID NO: 9848 - DNA, 10 bp, Artificial Sequence
  Synthetic Sequence
atgtggtatt

SEQ ID NO: 9849 - DNA, 10 bp, Artificial Sequence
  Synthetic Sequence
cttatagttc

SEQ ID NO: 9850 - DNA, 10 bp, Artificial Sequence
  Synthetic Sequence
tcaagtcata

SEQ ID NO: 9851 - DNA, 10 bp, Artificial Sequence
  Synthetic Sequence
taatcttgga

SEQ ID NO: 9852 - DNA, 10 bp, Artificial Sequence
  Synthetic Sequence
cccgttgtcg

SEQ ID NO: 9853 - DNA, 10 bp, Artificial Sequence
  Synthetic Sequence
caaggcggtt

SEQ ID NO: 9854 - DNA, 10 bp, Artificial Sequence
  Synthetic Sequence
cgggctttag

SEQ ID NO: 9855 - DNA, 10 bp, Artificial Sequence
  Synthetic Sequence
gtagacccac

SEQ ID NO: 9856 - DNA, 10 bp, Artificial Sequence
  Synthetic Sequence
tatggctaga

SEQ ID NO: 9857 - DNA, 10 bp, Artificial Sequence
  Synthetic Sequence
gaccatccag

SEQ ID NO: 9858 - DNA, 10 bp, Artificial Sequence
  Synthetic Sequence
cggagctcat

SEQ ID NO: 9859 - DNA, 10 bp, Artificial Sequence
  Synthetic Sequence
taatctgtct

SEQ ID NO: 9860 - DNA, 10 bp, Artificial Sequence
  Synthetic Sequence
actcacggtg

SEQ ID NO: 9861 - DNA, 10 bp, Artificial Sequence
  Synthetic Sequence
tgtgaggaca

SEQ ID NO: 9862 - DNA, 10 bp, Artificial Sequence
  Synthetic Sequence
caacgttgta

SEQ ID NO: 9863 - DNA, 10 bp, Artificial Sequence
  Synthetic Sequence
taattccagc

SEQ ID NO: 9864 - DNA, 10 bp, Artificial Sequence
  Synthetic Sequence
ccctcgtgca

SEQ ID NO: 9865 - DNA, 10 bp, Artificial Sequence
  Synthetic Sequence
tagaagggta

SEQ ID NO: 9866 - DNA, 10 bp, Artificial Sequence
  Synthetic Sequence
ccctgacatg

SEQ ID NO: 9867 - DNA, 10 bp, Artificial Sequence
  Synthetic Sequence
ggtatcacat

SEQ ID NO: 9868 - DNA, 10 bp, Artificial Sequence
  Synthetic Sequence
gtgtggcgct

SEQ ID NO: 9869 - DNA, 10 bp, Artificial Sequence
  Synthetic Sequence
ctgaatgaag

SEQ ID NO: 9870 - DNA, 10 bp, Artificial Sequence
  Synthetic Sequence
gatccaccca

SEQ ID NO: 9871 - DNA, 10 bp, Artificial Sequence
  Synthetic Sequence
acattaatct

SEQ ID NO: 9872 - DNA, 10 bp, Artificial Sequence
  Synthetic Sequence
cctttggaga

SEQ ID NO: 9873 - DNA, 10 bp, Artificial Sequence
  Synthetic Sequence
ataaacgagg

SEQ ID NO: 9874 - DNA, 10 bp, Artificial Sequence
  Synthetic Sequence
cgtcacggta

SEQ ID NO: 9875 - DNA, 10 bp, Artificial Sequence
  Synthetic Sequence
aatgggagta

SEQ ID NO: 9876 - DNA, 10 bp, Artificial Sequence
  Synthetic Sequence
ggctgctatc

SEQ ID NO: 9877 - DNA, 10 bp, Artificial Sequence
  Synthetic Sequence
cggtatgcgt

SEQ ID NO: 9878 - DNA, 10 bp, Artificial Sequence
  Synthetic Sequence
ccttataaag

SEQ ID NO: 9879 - DNA, 10 bp, Artificial Sequence
  Synthetic Sequence
cggctggtct

SEQ ID NO: 9880 - DNA, 10 bp, Artificial Sequence
  Synthetic Sequence
taacatgatg

SEQ ID NO: 9881 - DNA, 10 bp, Artificial Sequence
  Synthetic Sequence
ataagttaga

SEQ ID NO: 9882 - DNA, 10 bp, Artificial Sequence
  Synthetic Sequence
cccttcagca

SEQ ID NO: 9883 - DNA, 10 bp, Artificial Sequence
  Synthetic Sequence
tagttccgat

SEQ ID NO: 9884 - DNA, 10 bp, Artificial Sequence
  Synthetic Sequence
tcgtatagca

SEQ ID NO: 9885 - DNA, 10 bp, Artificial Sequence
  Synthetic Sequence
agagtcacct

SEQ ID NO: 9886 - DNA, 10 bp, Artificial Sequence
  Synthetic Sequence
tcggagtctc

SEQ ID NO: 9887 - DNA, 10 bp, Artificial Sequence
  Synthetic Sequence
tgcgctttgt

SEQ ID NO: 9888 - DNA, 10 bp, Artificial Sequence
  Synthetic Sequence
gaccgattat

SEQ ID NO: 9889 - DNA, 10 bp, Artificial Sequence
  Synthetic Sequence
cctgtgtgca

SEQ ID NO: 9890 - DNA, 10 bp, Artificial Sequence
  Synthetic Sequence
cctatactat

SEQ ID NO: 9891 - DNA, 10 bp, Artificial Sequence
  Synthetic Sequence
ccgacccatg

SEQ ID NO: 9892 - DNA, 10 bp, Artificial Sequence
  Synthetic Sequence
tagcagaatg

SEQ ID NO: 9893 - DNA, 10 bp, Artificial Sequence
  Synthetic Sequence
cccgcatagc

SEQ ID NO: 9894 - DNA, 10 bp, Artificial Sequence
  Synthetic Sequence
taagagttat

SEQ ID NO: 9895 - DNA, 10 bp, Artificial Sequence
  Synthetic Sequence
actcttggta

SEQ ID NO: 9896 - DNA, 10 bp, Artificial Sequence
  Synthetic Sequence
tcctccgtgc

SEQ ID NO: 9897 - DNA, 10 bp, Artificial Sequence
  Synthetic Sequence
cccaagtcat

SEQ ID NO: 9898 - DNA, 10 bp, Artificial Sequence
  Synthetic Sequence
tgttgccatg

SEQ ID NO: 9899 - DNA, 10 bp, Artificial Sequence
  Synthetic Sequence
ttgtataagg

SEQ ID NO: 9900 - DNA, 10 bp, Artificial Sequence
  Synthetic Sequence
ccatcgattg

SEQ ID NO: 9901 - DNA, 10 bp, Artificial Sequence
  Synthetic Sequence
caggcgcaca

SEQ ID NO: 9902 - DNA, 10 bp, Artificial Sequence
  Synthetic Sequence
tttaatcttg

SEQ ID NO: 9903 - DNA, 10 bp, Artificial Sequence
  Synthetic Sequence
acatcaatac

SEQ ID NO: 9904 - DNA, 10 bp, Artificial Sequence
  Synthetic Sequence
ccggtatcgg

SEQ ID NO: 9905 - DNA, 10 bp, Artificial Sequence
  Synthetic Sequence
caacatcaca

SEQ ID NO: 9906 - DNA, 10 bp, Artificial Sequence
  Synthetic Sequence
ttgtagcggc

SEQ ID NO: 9907 - DNA, 10 bp, Artificial Sequence
  Synthetic Sequence
ccagactcgt

SEQ ID NO: 9908 - DNA, 10 bp, Artificial Sequence
  Synthetic Sequence
agtgatcgaa

SEQ ID NO: 9909 - DNA, 10 bp, Artificial Sequence
  Synthetic Sequence
acagagccca

SEQ ID NO: 9910 - DNA, 10 bp, Artificial Sequence
  Synthetic Sequence
cggcccatag

SEQ ID NO: 9911 - DNA, 10 bp, Artificial Sequence
  Synthetic Sequence
ctgtatcttc

SEQ ID NO: 9912 - DNA, 10 bp, Artificial Sequence
  Synthetic Sequence
ctgccggtgt

SEQ ID NO: 9913 - DNA, 10 bp, Artificial Sequence
  Synthetic Sequence
ccttgtagtg

SEQ ID NO: 9914 - DNA, 10 bp, Artificial Sequence
  Synthetic Sequence
gtatccattt

SEQ ID NO: 9915 - DNA, 10 bp, Artificial Sequence
  Synthetic Sequence
cgctaccgat

SEQ ID NO: 9916 - DNA, 10 bp, Artificial Sequence
  Synthetic Sequence
ccagatgtgt

SEQ ID NO: 9917 - DNA, 10 bp, Artificial Sequence
  Synthetic Sequence
agcaaacact

SEQ ID NO: 9918 - DNA, 10 bp, Artificial Sequence
  Synthetic Sequence
caatttaaag

SEQ ID NO: 9919 - DNA, 10 bp, Artificial Sequence
  Synthetic Sequence
agggtggtta

SEQ ID NO: 9920 - DNA, 10 bp, Artificial Sequence
  Synthetic Sequence
atattagact

SEQ ID NO: 9921 - DNA, 10 bp, Artificial Sequence
  Synthetic Sequence
ggtccttggt

SEQ ID NO: 9922 - DNA, 10 bp, Artificial Sequence
  Synthetic Sequence
ccttggccac

SEQ ID NO: 9923 - DNA, 10 bp, Artificial Sequence
  Synthetic Sequence
acgatgactc

SEQ ID NO: 9924 - DNA, 10 bp, Artificial Sequence
  Synthetic Sequence
ctgggagcgt

SEQ ID NO: 9925 - DNA, 10 bp, Artificial Sequence
  Synthetic Sequence
aactgcgcaa

SEQ ID NO: 9926 - DNA, 10 bp, Artificial Sequence
  Synthetic Sequence
acacctgcac

SEQ ID NO: 9927 - DNA, 10 bp, Artificial Sequence
  Synthetic Sequence
cagggtctat

SEQ ID NO: 9928 - DNA, 10 bp, Artificial Sequence
  Synthetic Sequence
taaactgggt

SEQ ID NO: 9929 - DNA, 10 bp, Artificial Sequence
  Synthetic Sequence
ggaacaagag

SEQ ID NO: 9930 - DNA, 10 bp, Artificial Sequence
  Synthetic Sequence
cagatggtcg

SEQ ID NO: 9931 - DNA, 10 bp, Artificial Sequence
  Synthetic Sequence
cagcatggac

SEQ ID NO: 9932 - DNA, 10 bp, Artificial Sequence
  Synthetic Sequence
gcgcgttctg

SEQ ID NO: 9933 - DNA, 10 bp, Artificial Sequence
  Synthetic Sequence
cggcggaaca

SEQ ID NO: 9934 - DNA, 10 bp, Artificial Sequence
  Synthetic Sequence
catctgtctg

SEQ ID NO: 9935 - DNA, 10 bp, Artificial Sequence
  Synthetic Sequence
acatcgcaat

SEQ ID NO: 9936 - DNA, 10 bp, Artificial Sequence
  Synthetic Sequence
ggagtggtag

SEQ ID NO: 9937 - DNA, 10 bp, Artificial Sequence
  Synthetic Sequence
agcgacgttg

SEQ ID NO: 9938 - DNA, 10 bp, Artificial Sequence
  Synthetic Sequence
acgttgacat

SEQ ID NO: 9939 - DNA, 10 bp, Artificial Sequence
  Synthetic Sequence
cagagaattg

SEQ ID NO: 9940 - DNA, 10 bp, Artificial Sequence
  Synthetic Sequence
caataatcgc

SEQ ID NO: 9941 - DNA, 10 bp, Artificial Sequence
  Synthetic Sequence
tttgttatgt

SEQ ID NO: 9942 - DNA, 10 bp, Artificial Sequence
  Synthetic Sequence
aactggagac

SEQ ID NO: 9943 - DNA, 10 bp, Artificial Sequence
  Synthetic Sequence
atattaccgg

SEQ ID NO: 9944 - DNA, 10 bp, Artificial Sequence
  Synthetic Sequence
ctacgataat

SEQ ID NO: 9945 - DNA, 10 bp, Artificial Sequence
  Synthetic Sequence
gttgagtaga

SEQ ID NO: 9946 - DNA, 10 bp, Artificial Sequence
  Synthetic Sequence
ggccaatcgc

SEQ ID NO: 9947 - DNA, 10 bp, Artificial Sequence
  Synthetic Sequence
gtaattccag

SEQ ID NO: 9948 - DNA, 10 bp, Artificial Sequence
  Synthetic Sequence
cggcaatcat

SEQ ID NO: 9949 - DNA, 10 bp, Artificial Sequence
  Synthetic Sequence
gcagggtggt

SEQ ID NO: 9950 - DNA, 10 bp, Artificial Sequence
  Synthetic Sequence
ctactgggtc

SEQ ID NO: 9951 - DNA, 10 bp, Artificial Sequence
  Synthetic Sequence
acgccgttac

SEQ ID NO: 9952 - DNA, 10 bp, Artificial Sequence
  Synthetic Sequence
gcgcagatgt

SEQ ID NO: 9953 - DNA, 10 bp, Artificial Sequence
  Synthetic Sequence
ctttgggttt

SEQ ID NO: 9954 - DNA, 10 bp, Artificial Sequence
  Synthetic Sequence
gcgtcacggt

SEQ ID NO: 9955 - DNA, 10 bp, Artificial Sequence
  Synthetic Sequence
cgacctgagg

SEQ ID NO: 9956 - DNA, 10 bp, Artificial Sequence
  Synthetic Sequence
cgtacttaat

SEQ ID NO: 9957 - DNA, 10 bp, Artificial Sequence
  Synthetic Sequence
ccctcttatg

SEQ ID NO: 9958 - DNA, 10 bp, Artificial Sequence
  Synthetic Sequence
tacgccatcg

SEQ ID NO: 9959 - DNA, 10 bp, Artificial Sequence
  Synthetic Sequence
cctccgtgaa

SEQ ID NO: 9960 - DNA, 10 bp, Artificial Sequence
  Synthetic Sequence
gattgattca

SEQ ID NO: 9961 - DNA, 10 bp, Artificial Sequence
  Synthetic Sequence
gctcaagcaa

SEQ ID NO: 9962 - DNA, 10 bp, Artificial Sequence
  Synthetic Sequence
tcctcaacgt

SEQ ID NO: 9963 - DNA, 10 bp, Artificial Sequence
  Synthetic Sequence
gaccatagta

SEQ ID NO: 9964 - DNA, 10 bp, Artificial Sequence
  Synthetic Sequence
ccggcaggtt

SEQ ID NO: 9965 - DNA, 10 bp, Artificial Sequence
  Synthetic Sequence
gctgcatcct

SEQ ID NO: 9966 - DNA, 10 bp, Artificial Sequence
  Synthetic Sequence
tagtagcttt

SEQ ID NO: 9967 - DNA, 10 bp, Artificial Sequence
  Synthetic Sequence
acttctgaaa

SEQ ID NO: 9968 - DNA, 10 bp, Artificial Sequence
  Synthetic Sequence
gtatataacc

SEQ ID NO: 9969 - DNA, 10 bp, Artificial Sequence
  Synthetic Sequence
ctcttcggcg

SEQ ID NO: 9970 - DNA, 10 bp, Artificial Sequence
  Synthetic Sequence
taaaggagac

SEQ ID NO: 9971 - DNA, 10 bp, Artificial Sequence
  Synthetic Sequence
catattgaat

SEQ ID NO: 9972 - DNA, 10 bp, Artificial Sequence
  Synthetic Sequence
ggttgtctta

SEQ ID NO: 9973 - DNA, 10 bp, Artificial Sequence
  Synthetic Sequence
cggatctagg

SEQ ID NO: 9974 - DNA, 10 bp, Artificial Sequence
  Synthetic Sequence
gggtcacgca

SEQ ID NO: 9975 - DNA, 10 bp, Artificial Sequence
  Synthetic Sequence
ggtaagccca

SEQ ID NO: 9976 - DNA, 10 bp, Artificial Sequence
  Synthetic Sequence
aagtaatcaa

SEQ ID NO: 9977 - DNA, 10 bp, Artificial Sequence
  Synthetic Sequence
tatcccaatg

SEQ ID NO: 9978 - DNA, 10 bp, Artificial Sequence
  Synthetic Sequence
ttgcttcgtg

SEQ ID NO: 9979 - DNA, 10 bp, Artificial Sequence
  Synthetic Sequence
ccacatcagt

SEQ ID NO: 9980 - DNA, 10 bp, Artificial Sequence
  Synthetic Sequence
ggccacatgc

SEQ ID NO: 9981 - DNA, 10 bp, Artificial Sequence
  Synthetic Sequence
ctaatcgcac

SEQ ID NO: 9982 - DNA, 10 bp, Artificial Sequence
  Synthetic Sequence
cgcaatccat

SEQ ID NO: 9983 - DNA, 10 bp, Artificial Sequence
  Synthetic Sequence
tcaaggatct

SEQ ID NO: 9984 - DNA, 10 bp, Artificial Sequence
  Synthetic Sequence
gaatctcttt

SEQ ID NO: 9985 - DNA, 10 bp, Artificial Sequence
  Synthetic Sequence
gaagggtact

SEQ ID NO: 9986 - DNA, 10 bp, Artificial Sequence
  Synthetic Sequence
cgctcctgga

SEQ ID NO: 9987 - DNA, 10 bp, Artificial Sequence
  Synthetic Sequence
aacgtgaatt

SEQ ID NO: 9988 - DNA, 10 bp, Artificial Sequence
  Synthetic Sequence
ccggtccaga

SEQ ID NO: 9989 - DNA, 10 bp, Artificial Sequence
  Synthetic Sequence
cgacccatgc

SEQ ID NO: 9990 - DNA, 10 bp, Artificial Sequence
  Synthetic Sequence
tatgggagcg

SEQ ID NO: 9991 - DNA, 10 bp, Artificial Sequence
  Synthetic Sequence
taaggccgtc

SEQ ID NO: 9992 - DNA, 10 bp, Artificial Sequence
  Synthetic Sequence
gtagtgggcg

SEQ ID NO: 9993 - DNA, 10 bp, Artificial Sequence
  Synthetic Sequence
tgctataacg

SEQ ID NO: 9994 - DNA, 10 bp, Artificial Sequence
  Synthetic Sequence
ggaggaccca

SEQ ID NO: 9995 - DNA, 10 bp, Artificial Sequence
  Synthetic Sequence
gtacttggag

SEQ ID NO: 9996 - DNA, 10 bp, Artificial Sequence
  Synthetic Sequence
ttggaatcgt

SEQ ID NO: 9997 - DNA, 10 bp, Artificial Sequence
  Synthetic Sequence
agagcttaat

SEQ ID NO: 9998 - DNA, 10 bp, Artificial Sequence
  Synthetic Sequence
gctgccggat

SEQ ID NO: 9999 - DNA, 10 bp, Artificial Sequence
  Synthetic Sequence
agacggtacg

SEQ ID NO: 10000 - DNA, 10 bp, Artificial Sequence
  Synthetic Sequence
ggatcagact

SEQ ID NO: 10001 - DNA, 10 bp, Artificial Sequence
  Synthetic Sequence
cgggcctatg

SEQ ID NO: 10002 - DNA, 10 bp, Artificial Sequence
  Synthetic Sequence
ttcgaggatg

SEQ ID NO: 10003 - DNA, 10 bp, Artificial Sequence
  Synthetic Sequence
cgcgagttcc

SEQ ID NO: 10004 - DNA, 10 bp, Artificial Sequence
  Synthetic Sequence
tttgcgctcg

SEQ ID NO: 10005 - DNA, 10 bp, Artificial Sequence
  Synthetic Sequence
gcttatccac

SEQ ID NO: 10006 - DNA, 10 bp, Artificial Sequence
  Synthetic Sequence
gcgaaacgga

SEQ ID NO: 10007 - DNA, 10 bp, Artificial Sequence
  Synthetic Sequence
atcacttgtc

SEQ ID NO: 10008 - DNA, 10 bp, Artificial Sequence
  Synthetic Sequence
tacccttggt

SEQ ID NO: 10009 - DNA, 10 bp, Artificial Sequence
  Synthetic Sequence
cttaaggtgc

SEQ ID NO: 10010 - DNA, 10 bp, Artificial Sequence
  Synthetic Sequence
ctcgcaatag

SEQ ID NO: 10011 - DNA, 10 bp, Artificial Sequence
  Synthetic Sequence
tatacggagc

SEQ ID NO: 10012 - DNA, 10 bp, Artificial Sequence
  Synthetic Sequence
agataataat

SEQ ID NO: 10013 - DNA, 10 bp, Artificial Sequence
  Synthetic Sequence
gcgtaataac

SEQ ID NO: 10014 - DNA, 10 bp, Artificial Sequence
  Synthetic Sequence
tgttaaggaa

SEQ ID NO: 10015 - DNA, 10 bp, Artificial Sequence
  Synthetic Sequence
ttctaaagaa

SEQ ID NO: 10016 - DNA, 10 bp, Artificial Sequence
  Synthetic Sequence
tagcaacccg

SEQ ID NO: 10017 - DNA, 10 bp, Artificial Sequence
  Synthetic Sequence
gaactgccta

SEQ ID NO: 10018 - DNA, 10 bp, Artificial Sequence
  Synthetic Sequence
acgtgtctaa

SEQ ID NO: 10019 - DNA, 10 bp, Artificial Sequence
  Synthetic Sequence
aggcgaggtc

SEQ ID NO: 10020 - DNA, 10 bp, Artificial Sequence
  Synthetic Sequence
ctcggcaaga

SEQ ID NO: 10021 - DNA, 10 bp, Artificial Sequence
  Synthetic Sequence
ggcacccgat

SEQ ID NO: 10022 - DNA, 10 bp, Artificial Sequence
  Synthetic Sequence
attcaatgtc

SEQ ID NO: 10023 - DNA, 10 bp, Artificial Sequence
  Synthetic Sequence
agctaaatta

SEQ ID NO: 10024 - DNA, 10 bp, Artificial Sequence
  Synthetic Sequence
taggccactg

SEQ ID NO: 10025 - DNA, 10 bp, Artificial Sequence
  Synthetic Sequence
tcctagatct

SEQ ID NO: 10026 - DNA, 10 bp, Artificial Sequence
  Synthetic Sequence
tctacttggc

SEQ ID NO: 10027 - DNA, 10 bp, Artificial Sequence
  Synthetic Sequence
gtccttgtgg

SEQ ID NO: 10028 - DNA, 10 bp, Artificial Sequence
  Synthetic Sequence
ggtacagcgg

SEQ ID NO: 10029 - DNA, 10 bp, Artificial Sequence
  Synthetic Sequence
cggttcatcg

SEQ ID NO: 10030 - DNA, 10 bp, Artificial Sequence
  Synthetic Sequence
ctctgatgtt

SEQ ID NO: 10031 - DNA, 10 bp, Artificial Sequence
  Synthetic Sequence
cgtgttgtgt

SEQ ID NO: 10032 - DNA, 10 bp, Artificial Sequence
  Synthetic Sequence
ctttgaccat

SEQ ID NO: 10033 - DNA, 10 bp, Artificial Sequence
  Synthetic Sequence
aactttgtct

SEQ ID NO: 10034 - DNA, 10 bp, Artificial Sequence
  Synthetic Sequence
ctgttacagc

SEQ ID NO: 10035 - DNA, 10 bp, Artificial Sequence
  Synthetic Sequence
ttcaccttac

SEQ ID NO: 10036 - DNA, 10 bp, Artificial Sequence
  Synthetic Sequence
tttctcgtca

SEQ ID NO: 10037 - DNA, 10 bp, Artificial Sequence
  Synthetic Sequence
gacgccgaca

SEQ ID NO: 10038 - DNA, 10 bp, Artificial Sequence
  Synthetic Sequence
gtctgagacg

SEQ ID NO: 10039 - DNA, 10 bp, Artificial Sequence
  Synthetic Sequence
aaggtttatg

SEQ ID NO: 10040 - DNA, 10 bp, Artificial Sequence
  Synthetic Sequence
aggtctgtcg

SEQ ID NO: 10041 - DNA, 10 bp, Artificial Sequence
  Synthetic Sequence
tgcgtggttc

SEQ ID NO: 10042 - DNA, 10 bp, Artificial Sequence
  Synthetic Sequence
cgcccgcata

SEQ ID NO: 10043 - DNA, 10 bp, Artificial Sequence
  Synthetic Sequence
tttatcgctt

SEQ ID NO: 10044 - DNA, 10 bp, Artificial Sequence
  Synthetic Sequence
caggatccgt

SEQ ID NO: 10045 - DNA, 10 bp, Artificial Sequence
  Synthetic Sequence
cgagtaaaca

SEQ ID NO: 10046 - DNA, 10 bp, Artificial Sequence
  Synthetic Sequence
tgcttccctg

SEQ ID NO: 10047 - DNA, 10 bp, Artificial Sequence
  Synthetic Sequence
gtatgtacgt

SEQ ID NO: 10048 - DNA, 10 bp, Artificial Sequence
  Synthetic Sequence
atttcaatgg

SEQ ID NO: 10049 - DNA, 10 bp, Artificial Sequence
  Synthetic Sequence
cgctgaccca

SEQ ID NO: 10050 - DNA, 10 bp, Artificial Sequence
  Synthetic Sequence
ccttaacagg

SEQ ID NO: 10051 - DNA, 10 bp, Artificial Sequence
  Synthetic Sequence
tgaggttcat

SEQ ID NO: 10052 - DNA, 10 bp, Artificial Sequence
  Synthetic Sequence
gtgccaggga

SEQ ID NO: 10053 - DNA, 10 bp, Artificial Sequence
  Synthetic Sequence
tgaactcgcc

SEQ ID NO: 10054 - DNA, 10 bp, Artificial Sequence
  Synthetic Sequence
tttagttggt

SEQ ID NO: 10055 - DNA, 10 bp, Artificial Sequence
  Synthetic Sequence
attgagcgcc

SEQ ID NO: 10056 - DNA, 10 bp, Artificial Sequence
  Synthetic Sequence
gcttagccgg

SEQ ID NO: 10057 - DNA, 10 bp, Artificial Sequence
  Synthetic Sequence
ggctgaagat

SEQ ID NO: 10058 - DNA, 10 bp, Artificial Sequence
  Synthetic Sequence
ccaaggtaag

SEQ ID NO: 10059 - DNA, 10 bp, Artificial Sequence
  Synthetic Sequence
cggacatatc

SEQ ID NO: 10060 - DNA, 10 bp, Artificial Sequence
  Synthetic Sequence
accgatctcc

SEQ ID NO: 10061 - DNA, 10 bp, Artificial Sequence
  Synthetic Sequence
ggaaggagta

SEQ ID NO: 10062 - DNA, 10 bp, Artificial Sequence
  Synthetic Sequence
gatgagatct

SEQ ID NO: 10063 - DNA, 10 bp, Artificial Sequence
  Synthetic Sequence
ctttagtagc

SEQ ID NO: 10064 - DNA, 10 bp, Artificial Sequence
  Synthetic Sequence
gcctgttctc

SEQ ID NO: 10065 - DNA, 10 bp, Artificial Sequence
  Synthetic Sequence
actaaggata

SEQ ID NO: 10066 - DNA, 10 bp, Artificial Sequence
  Synthetic Sequence
tttatataag

SEQ ID NO: 10067 - DNA, 10 bp, Artificial Sequence
  Synthetic Sequence
cgatagtgac

SEQ ID NO: 10068 - DNA, 10 bp, Artificial Sequence
  Synthetic Sequence
tcacttactc

SEQ ID NO: 10069 - DNA, 10 bp, Artificial Sequence
  Synthetic Sequence
gtactcggta

SEQ ID NO: 10070 - DNA, 10 bp, Artificial Sequence
  Synthetic Sequence
tcacccgtac

SEQ ID NO: 10071 - DNA, 10 bp, Artificial Sequence
  Synthetic Sequence
gattcaggga

SEQ ID NO: 10072 - DNA, 10 bp, Artificial Sequence
  Synthetic Sequence
gagaggcgtc

SEQ ID NO: 10073 - DNA, 10 bp, Artificial Sequence
  Synthetic Sequence
gctcatgaac

SEQ ID NO: 10074 - DNA, 10 bp, Artificial Sequence
  Synthetic Sequence
ccaataatga

SEQ ID NO: 10075 - DNA, 10 bp, Artificial Sequence
  Synthetic Sequence
tagatcgtac

SEQ ID NO: 10076 - DNA, 10 bp, Artificial Sequence
  Synthetic Sequence
aagcttgcgc

SEQ ID NO: 10077 - DNA, 10 bp, Artificial Sequence
  Synthetic Sequence
gttacgtcga

SEQ ID NO: 10078 - DNA, 10 bp, Artificial Sequence
  Synthetic Sequence
ggtctgggtg

SEQ ID NO: 10079 - DNA, 10 bp, Artificial Sequence
  Synthetic Sequence
tcttacccta

SEQ ID NO: 10080 - DNA, 10 bp, Artificial Sequence
  Synthetic Sequence
acttgtgttt

SEQ ID NO: 10081 - DNA, 10 bp, Artificial Sequence
  Synthetic Sequence
tatccgttgt

SEQ ID NO: 10082 - DNA, 10 bp, Artificial Sequence
  Synthetic Sequence
tcgagataga

SEQ ID NO: 10083 - DNA, 10 bp, Artificial Sequence
  Synthetic Sequence
tctgtagagc

SEQ ID NO: 10084 - DNA, 10 bp, Artificial Sequence
  Synthetic Sequence
gacactgggc

SEQ ID NO: 10085 - DNA, 10 bp, Artificial Sequence
  Synthetic Sequence
ggacattccc

SEQ ID NO: 10086 - DNA, 10 bp, Artificial Sequence
  Synthetic Sequence
attctgagtg

SEQ ID NO: 10087 - DNA, 10 bp, Artificial Sequence
  Synthetic Sequence
gagagccaag

SEQ ID NO: 10088 - DNA, 10 bp, Artificial Sequence
  Synthetic Sequence
ccgcgacaca

SEQ ID NO: 10089 - DNA, 10 bp, Artificial Sequence
  Synthetic Sequence
gcgttggagc

SEQ ID NO: 10090 - DNA, 10 bp, Artificial Sequence
  Synthetic Sequence
ctcaattcag

SEQ ID NO: 10091 - DNA, 10 bp, Artificial Sequence
  Synthetic Sequence
atgtatcggt

SEQ ID NO: 10092 - DNA, 10 bp, Artificial Sequence
  Synthetic Sequence
tgccgtaggc

SEQ ID NO: 10093 - DNA, 10 bp, Artificial Sequence
  Synthetic Sequence
gtatctcact

SEQ ID NO: 10094 - DNA, 10 bp, Artificial Sequence
  Synthetic Sequence
accgcggact

SEQ ID NO: 10095 - DNA, 10 bp, Artificial Sequence
  Synthetic Sequence
cgtatcgctg

SEQ ID NO: 10096 - DNA, 10 bp, Artificial Sequence
  Synthetic Sequence
agcattgtta

SEQ ID NO: 10097 - DNA, 10 bp, Artificial Sequence
  Synthetic Sequence
tcctcatccc

SEQ ID NO: 10098 - DNA, 10 bp, Artificial Sequence
  Synthetic Sequence
aacatcgtcc

SEQ ID NO: 10099 - DNA, 10 bp, Artificial Sequence
  Synthetic Sequence
cacgaggtct

SEQ ID NO: 10100 - DNA, 10 bp, Artificial Sequence
  Synthetic Sequence
ttcgtcaagg

SEQ ID NO: 10101 - DNA, 10 bp, Artificial Sequence
  Synthetic Sequence
gcatgcaact

SEQ ID NO: 10102 - DNA, 10 bp, Artificial Sequence
  Synthetic Sequence
gatatcgtgc

SEQ ID NO: 10103 - DNA, 10 bp, Artificial Sequence
  Synthetic Sequence
gagtctgcgc

SEQ ID NO: 10104 - DNA, 10 bp, Artificial Sequence
  Synthetic Sequence
gcaaatatcc

SEQ ID NO: 10105 - DNA, 10 bp, Artificial Sequence
  Synthetic Sequence
cgcccttcct

SEQ ID NO: 10106 - DNA, 10 bp, Artificial Sequence
  Synthetic Sequence
agttgaccct

SEQ ID NO: 10107 - DNA, 10 bp, Artificial Sequence
  Synthetic Sequence
cccactagtc

SEQ ID NO: 10108 - DNA, 10 bp, Artificial Sequence
  Synthetic Sequence
gtgtctcgac

SEQ ID NO: 10109 - DNA, 10 bp, Artificial Sequence
  Synthetic Sequence
tttagttaac

SEQ ID NO: 10110 - DNA, 10 bp, Artificial Sequence
  Synthetic Sequence
ggcagactgc

SEQ ID NO: 10111 - DNA, 10 bp, Artificial Sequence
  Synthetic Sequence
cttgtctgcg

SEQ ID NO: 10112 - DNA, 10 bp, Artificial Sequence
  Synthetic Sequence
gttgggccac

SEQ ID NO: 10113 - DNA, 10 bp, Artificial Sequence
  Synthetic Sequence
catcgacgga

SEQ ID NO: 10114 - DNA, 10 bp, Artificial Sequence
  Synthetic Sequence
acttatagga

SEQ ID NO: 10115 - DNA, 10 bp, Artificial Sequence
  Synthetic Sequence
tcgatgttat

SEQ ID NO: 10116 - DNA, 10 bp, Artificial Sequence
  Synthetic Sequence
aggctaatct

SEQ ID NO: 10117 - DNA, 10 bp, Artificial Sequence
  Synthetic Sequence
atacgattta

SEQ ID NO: 10118 - DNA, 10 bp, Artificial Sequence
  Synthetic Sequence
ttacttcggc

SEQ ID NO: 10119 - DNA, 10 bp, Artificial Sequence
  Synthetic Sequence
ggctcatcat

SEQ ID NO: 10120 - DNA, 10 bp, Artificial Sequence
  Synthetic Sequence
cctgaacctc

SEQ ID NO: 10121 - DNA, 10 bp, Artificial Sequence
  Synthetic Sequence
gctcccgaag

SEQ ID NO: 10122 - DNA, 10 bp, Artificial Sequence
  Synthetic Sequence
caggtgtacg

SEQ ID NO: 10123 - DNA, 10 bp, Artificial Sequence
  Synthetic Sequence
ctgtgggcat

SEQ ID NO: 10124 - DNA, 10 bp, Artificial Sequence
  Synthetic Sequence
aatatacaca

SEQ ID NO: 10125 - DNA, 10 bp, Artificial Sequence
  Synthetic Sequence
ttagcccatc

SEQ ID NO: 10126 - DNA, 10 bp, Artificial Sequence
  Synthetic Sequence
gggctattgc

SEQ ID NO: 10127 - DNA, 10 bp, Artificial Sequence
  Synthetic Sequence
atcatatgct

SEQ ID NO: 10128 - DNA, 10 bp, Artificial Sequence
  Synthetic Sequence
atctctggtg

SEQ ID NO: 10129 - DNA, 10 bp, Artificial Sequence
  Synthetic Sequence
gattccctgc

SEQ ID NO: 10130 - DNA, 10 bp, Artificial Sequence
  Synthetic Sequence
tgaatatccc

SEQ ID NO: 10131 - DNA, 10 bp, Artificial Sequence
  Synthetic Sequence
acccatccac

SEQ ID NO: 10132 - DNA, 10 bp, Artificial Sequence
  Synthetic Sequence
attcgactat

SEQ ID NO: 10133 - DNA, 10 bp, Artificial Sequence
  Synthetic Sequence
ttctgactag

SEQ ID NO: 10134 - DNA, 10 bp, Artificial Sequence
  Synthetic Sequence
caaacagtat

SEQ ID NO: 10135 - DNA, 10 bp, Artificial Sequence
  Synthetic Sequence
ccacctctct

SEQ ID NO: 10136 - DNA, 10 bp, Artificial Sequence
  Synthetic Sequence
actttgggca

SEQ ID NO: 10137 - DNA, 10 bp, Artificial Sequence
  Synthetic Sequence
aaagtcgcta

SEQ ID NO: 10138 - DNA, 10 bp, Artificial Sequence
  Synthetic Sequence
ggataccagc

SEQ ID NO: 10139 - DNA, 10 bp, Artificial Sequence
  Synthetic Sequence
tgcctctggc

SEQ ID NO: 10140 - DNA, 10 bp, Artificial Sequence
  Synthetic Sequence
tgtatgacaa

SEQ ID NO: 10141 - DNA, 10 bp, Artificial Sequence
  Synthetic Sequence
tcgacaccgt

SEQ ID NO: 10142 - DNA, 10 bp, Artificial Sequence
  Synthetic Sequence
cactcaagca

SEQ ID NO: 10143 - DNA, 10 bp, Artificial Sequence
  Synthetic Sequence
agaaagtagc

SEQ ID NO: 10144 - DNA, 10 bp, Artificial Sequence
  Synthetic Sequence
ggatgtttca

SEQ ID NO: 10145 - DNA, 10 bp, Artificial Sequence
  Synthetic Sequence
cttaaattac

SEQ ID NO: 10146 - DNA, 10 bp, Artificial Sequence
  Synthetic Sequence
atgaggtgga

SEQ ID NO: 10147 - DNA, 10 bp, Artificial Sequence
  Synthetic Sequence
tgggcgacca

SEQ ID NO: 10148 - DNA, 10 bp, Artificial Sequence
  Synthetic Sequence
aaaccctttc

SEQ ID NO: 10149 - DNA, 10 bp, Artificial Sequence
  Synthetic Sequence
caaccacggc

SEQ ID NO: 10150 - DNA, 10 bp, Artificial Sequence
  Synthetic Sequence
tcacagctgc

SEQ ID NO: 10151 - DNA, 10 bp, Artificial Sequence
  Synthetic Sequence
aatatcggac

SEQ ID NO: 10152 - DNA, 10 bp, Artificial Sequence
  Synthetic Sequence
tgatcttcag

SEQ ID NO: 10153 - DNA, 10 bp, Artificial Sequence
  Synthetic Sequence
accacccaca

SEQ ID NO: 10154 - DNA, 10 bp, Artificial Sequence
  Synthetic Sequence
ggccctcttg

SEQ ID NO: 10155 - DNA, 10 bp, Artificial Sequence
  Synthetic Sequence
ctgattatta

SEQ ID NO: 10156 - DNA, 10 bp, Artificial Sequence
  Synthetic Sequence
cgttcctcat

SEQ ID NO: 10157 - DNA, 10 bp, Artificial Sequence
  Synthetic Sequence
caagcgccct

SEQ ID NO: 10158 - DNA, 10 bp, Artificial Sequence
  Synthetic Sequence
atacatgcag

SEQ ID NO: 10159 - DNA, 10 bp, Artificial Sequence
  Synthetic Sequence
gcctgacgct

SEQ ID NO: 10160 - DNA, 10 bp, Artificial Sequence
  Synthetic Sequence
atgcgttgat

SEQ ID NO: 10161 - DNA, 10 bp, Artificial Sequence
  Synthetic Sequence
gttattcatg

SEQ ID NO: 10162 - DNA, 10 bp, Artificial Sequence
  Synthetic Sequence
aataacctcg

SEQ ID NO: 10163 - DNA, 10 bp, Artificial Sequence
  Synthetic Sequence
gttgtaagca

SEQ ID NO: 10164 - DNA, 10 bp, Artificial Sequence
  Synthetic Sequence
cggcaaatta

SEQ ID NO: 10165 - DNA, 10 bp, Artificial Sequence
  Synthetic Sequence
tttctgcctc

SEQ ID NO: 10166 - DNA, 10 bp, Artificial Sequence
  Synthetic Sequence
caccactctt

SEQ ID NO: 10167 - DNA, 10 bp, Artificial Sequence
  Synthetic Sequence
ctgttcgcga

SEQ ID NO: 10168 - DNA, 10 bp, Artificial Sequence
  Synthetic Sequence
acttctagtt

SEQ ID NO: 10169 - DNA, 10 bp, Artificial Sequence
  Synthetic Sequence
taacacgcca

SEQ ID NO: 10170 - DNA, 10 bp, Artificial Sequence
  Synthetic Sequence
ttcagctggc

SEQ ID NO: 10171 - DNA, 10 bp, Artificial Sequence
  Synthetic Sequence
agcctttccc

SEQ ID NO: 10172 - DNA, 10 bp, Artificial Sequence
  Synthetic Sequence
cctgccacca

SEQ ID NO: 10173 - DNA, 10 bp, Artificial Sequence
  Synthetic Sequence
ccgggaacac

SEQ ID NO: 10174 - DNA, 10 bp, Artificial Sequence
  Synthetic Sequence
caggctcctc

SEQ ID NO: 10175 - DNA, 10 bp, Artificial Sequence
  Synthetic Sequence
ctgaccacga

SEQ ID NO: 10176 - DNA, 10 bp, Artificial Sequence
  Synthetic Sequence
taacaggtcg

SEQ ID NO: 10177 - DNA, 10 bp, Artificial Sequence
  Synthetic Sequence
ccatctgatt

SEQ ID NO: 10178 - DNA, 10 bp, Artificial Sequence
  Synthetic Sequence
tcatagcccg

SEQ ID NO: 10179 - DNA, 10 bp, Artificial Sequence
  Synthetic Sequence
atccggatca

SEQ ID NO: 10180 - DNA, 10 bp, Artificial Sequence
  Synthetic Sequence
ctggtgatcg

SEQ ID NO: 10181 - DNA, 10 bp, Artificial Sequence
  Synthetic Sequence
caagggaaca

SEQ ID NO: 10182 - DNA, 10 bp, Artificial Sequence
  Synthetic Sequence
gatcctgctc

SEQ ID NO: 10183 - DNA, 10 bp, Artificial Sequence
  Synthetic Sequence
ctagagttgt

SEQ ID NO: 10184 - DNA, 10 bp, Artificial Sequence
  Synthetic Sequence
cttctcaaac

SEQ ID NO: 10185 - DNA, 10 bp, Artificial Sequence
  Synthetic Sequence
atgaatgact

SEQ ID NO: 10186 - DNA, 10 bp, Artificial Sequence
  Synthetic Sequence
gcgaatcagg

SEQ ID NO: 10187 - DNA, 10 bp, Artificial Sequence
  Synthetic Sequence
tcagaccttt

SEQ ID NO: 10188 - DNA, 10 bp, Artificial Sequence
  Synthetic Sequence
ccacatgtac

SEQ ID NO: 10189 - DNA, 10 bp, Artificial Sequence
  Synthetic Sequence
ttacaactta

SEQ ID NO: 10190 - DNA, 10 bp, Artificial Sequence
  Synthetic Sequence
gcagaatact

SEQ ID NO: 10191 - DNA, 10 bp, Artificial Sequence
  Synthetic Sequence
ggcgatacgg

SEQ ID NO: 10192 - DNA, 10 bp, Artificial Sequence
  Synthetic Sequence
tccttaaact

SEQ ID NO: 10193 - DNA, 10 bp, Artificial Sequence
  Synthetic Sequence
gcagaacgcc

SEQ ID NO: 10194 - DNA, 10 bp, Artificial Sequence
  Synthetic Sequence
cgcgtattgt

SEQ ID NO: 10195 - DNA, 10 bp, Artificial Sequence
  Synthetic Sequence
catagaccca

SEQ ID NO: 10196 - DNA, 10 bp, Artificial Sequence
  Synthetic Sequence
acaatgggcc

SEQ ID NO: 10197 - DNA, 10 bp, Artificial Sequence
  Synthetic Sequence
gatcacccgc

SEQ ID NO: 10198 - DNA, 10 bp, Artificial Sequence
  Synthetic Sequence
ctcgatgcca

SEQ ID NO: 10199 - DNA, 10 bp, Artificial Sequence
  Synthetic Sequence
tattcagcag

SEQ ID NO: 10200 - DNA, 10 bp, Artificial Sequence
  Synthetic Sequence
aacgagcgct

SEQ ID NO: 10201 - DNA, 10 bp, Artificial Sequence
  Synthetic Sequence
aaaggatgtc

SEQ ID NO: 10202 - DNA, 10 bp, Artificial Sequence
  Synthetic Sequence
gaaatgttgg

SEQ ID NO: 10203 - DNA, 10 bp, Artificial Sequence
  Synthetic Sequence
ctgtatcacg

SEQ ID NO: 10204 - DNA, 10 bp, Artificial Sequence
  Synthetic Sequence
cggcgctaag

SEQ ID NO: 10205 - DNA, 10 bp, Artificial Sequence
  Synthetic Sequence
taagagcctt

SEQ ID NO: 10206 - DNA, 10 bp, Artificial Sequence
  Synthetic Sequence
tatccacaac

SEQ ID NO: 10207 - DNA, 10 bp, Artificial Sequence
  Synthetic Sequence
tgaggatttg

SEQ ID NO: 10208 - DNA, 10 bp, Artificial Sequence
  Synthetic Sequence
tttcaaatct

SEQ ID NO: 10209 - DNA, 10 bp, Artificial Sequence
  Synthetic Sequence
gcagttgaaa

SEQ ID NO: 10210 - DNA, 10 bp, Artificial Sequence
  Synthetic Sequence
ttctcgcatg

SEQ ID NO: 10211 - DNA, 10 bp, Artificial Sequence
  Synthetic Sequence
tggccatgcc

SEQ ID NO: 10212 - DNA, 10 bp, Artificial Sequence
  Synthetic Sequence
aacaacgtag

SEQ ID NO: 10213 - DNA, 10 bp, Artificial Sequence
  Synthetic Sequence
ggaatattaa

SEQ ID NO: 10214 - DNA, 10 bp, Artificial Sequence
  Synthetic Sequence
gactgcaacc

SEQ ID NO: 10215 - DNA, 10 bp, Artificial Sequence
  Synthetic Sequence
ctcgacttaa

SEQ ID NO: 10216 - DNA, 10 bp, Artificial Sequence
  Synthetic Sequence
tcgtctgccc

SEQ ID NO: 10217 - DNA, 10 bp, Artificial Sequence
  Synthetic Sequence
aggaaagtcg

SEQ ID NO: 10218 - DNA, 10 bp, Artificial Sequence
  Synthetic Sequence
cactctggcg

SEQ ID NO: 10219 - DNA, 10 bp, Artificial Sequence
  Synthetic Sequence
ccgtaattcg

SEQ ID NO: 10220 - DNA, 10 bp, Artificial Sequence
  Synthetic Sequence
ctaggtcatt

SEQ ID NO: 10221 - DNA, 10 bp, Artificial Sequence
  Synthetic Sequence
ctaccaaccg

SEQ ID NO: 10222 - DNA, 10 bp, Artificial Sequence
  Synthetic Sequence
tatctgctat

SEQ ID NO: 10223 - DNA, 10 bp, Artificial Sequence
  Synthetic Sequence
atacgaaaca

SEQ ID NO: 10224 - DNA, 10 bp, Artificial Sequence
  Synthetic Sequence
tattgcgctg

SEQ ID NO: 10225 - DNA, 10 bp, Artificial Sequence
  Synthetic Sequence
tgctgcattt

SEQ ID NO: 10226 - DNA, 10 bp, Artificial Sequence
  Synthetic Sequence
aggtcccatc

SEQ ID NO: 10227 - DNA, 10 bp, Artificial Sequence
  Synthetic Sequence
aatgtgtcta

SEQ ID NO: 10228 - DNA, 10 bp, Artificial Sequence
  Synthetic Sequence
agttgacaag

SEQ ID NO: 10229 - DNA, 10 bp, Artificial Sequence
  Synthetic Sequence
actgaccata

SEQ ID NO: 10230 - DNA, 10 bp, Artificial Sequence
  Synthetic Sequence
acaacacact

SEQ ID NO: 10231 - DNA, 10 bp, Artificial Sequence
  Synthetic Sequence
tagacactag

SEQ ID NO: 10232 - DNA, 10 bp, Artificial Sequence
  Synthetic Sequence
tccttaggga

SEQ ID NO: 10233 - DNA, 10 bp, Artificial Sequence
  Synthetic Sequence
aaaggtcagt

SEQ ID NO: 10234 - DNA, 10 bp, Artificial Sequence
  Synthetic Sequence
gacgcatcaa

SEQ ID NO: 10235 - DNA, 10 bp, Artificial Sequence
  Synthetic Sequence
gcccagtatg

SEQ ID NO: 10236 - DNA, 10 bp, Artificial Sequence
  Synthetic Sequence
agagcgctgc

SEQ ID NO: 10237 - DNA, 10 bp, Artificial Sequence
  Synthetic Sequence
ccgatttcga

SEQ ID NO: 10238 - DNA, 10 bp, Artificial Sequence
  Synthetic Sequence
tcctacacga

SEQ ID NO: 10239 - DNA, 10 bp, Artificial Sequence
  Synthetic Sequence
ctaacactac

SEQ ID NO: 10240 - DNA, 10 bp, Artificial Sequence
  Synthetic Sequence
aaattctaat

SEQ ID NO: 10241 - DNA, 10 bp, Artificial Sequence
  Synthetic Sequence
cagttgtcat

SEQ ID NO: 10242 - DNA, 10 bp, Artificial Sequence
  Synthetic Sequence
aatacttatc

SEQ ID NO: 10243 - DNA, 10 bp, Artificial Sequence
  Synthetic Sequence
gagcgcacga

SEQ ID NO: 10244 - DNA, 10 bp, Artificial Sequence
  Synthetic Sequence
accgaagaac

SEQ ID NO: 10245 - DNA, 10 bp, Artificial Sequence
  Synthetic Sequence
cgacgttatt

SEQ ID NO: 10246 - DNA, 10 bp, Artificial Sequence
  Synthetic Sequence
tagccgagta

SEQ ID NO: 10247 - DNA, 10 bp, Artificial Sequence
  Synthetic Sequence
tgccgacatg

SEQ ID NO: 10248 - DNA, 10 bp, Artificial Sequence
  Synthetic Sequence
cgcagagtcc

SEQ ID NO: 10249 - DNA, 10 bp, Artificial Sequence
  Synthetic Sequence
aaacaaggat

SEQ ID NO: 10250 - DNA, 10 bp, Artificial Sequence
  Synthetic Sequence
ggaagcctcg

SEQ ID NO: 10251 - DNA, 10 bp, Artificial Sequence
  Synthetic Sequence
gtactaagcc

SEQ ID NO: 10252 - DNA, 10 bp, Artificial Sequence
  Synthetic Sequence
catgatttag

SEQ ID NO: 10253 - DNA, 10 bp, Artificial Sequence
  Synthetic Sequence
aacgagattc

SEQ ID NO: 10254 - DNA, 10 bp, Artificial Sequence
  Synthetic Sequence
tccaaactct

SEQ ID NO: 10255 - DNA, 10 bp, Artificial Sequence
  Synthetic Sequence
acgtctagaa

SEQ ID NO: 10256 - DNA, 10 bp, Artificial Sequence
  Synthetic Sequence
aagactagta

SEQ ID NO: 10257 - DNA, 10 bp, Artificial Sequence
  Synthetic Sequence
tcaagctaat

SEQ ID NO: 10258 - DNA, 10 bp, Artificial Sequence
  Synthetic Sequence
acggcggttc

SEQ ID NO: 10259 - DNA, 10 bp, Artificial Sequence
  Synthetic Sequence
tcgggaagcg

SEQ ID NO: 10260 - DNA, 10 bp, Artificial Sequence
  Synthetic Sequence
ggtatacacc

SEQ ID NO: 10261 - DNA, 10 bp, Artificial Sequence
  Synthetic Sequence
ggtgttggat

SEQ ID NO: 10262 - DNA, 10 bp, Artificial Sequence
  Synthetic Sequence
tagtggagga

SEQ ID NO: 10263 - DNA, 10 bp, Artificial Sequence
  Synthetic Sequence
cacctaccgg

SEQ ID NO: 10264 - DNA, 10 bp, Artificial Sequence
  Synthetic Sequence
ccgtgctaat

SEQ ID NO: 10265 - DNA, 10 bp, Artificial Sequence
  Synthetic Sequence
ccagcgaacg

SEQ ID NO: 10266 - DNA, 10 bp, Artificial Sequence
  Synthetic Sequence
tctcccttct

SEQ ID NO: 10267 - DNA, 10 bp, Artificial Sequence
  Synthetic Sequence
tcttccatta

SEQ ID NO: 10268 - DNA, 10 bp, Artificial Sequence
  Synthetic Sequence
cgtggcgtct

SEQ ID NO: 10269 - DNA, 10 bp, Artificial Sequence
  Synthetic Sequence
gatactctca

SEQ ID NO: 10270 - DNA, 10 bp, Artificial Sequence
  Synthetic Sequence
aagattctcc

SEQ ID NO: 10271 - DNA, 10 bp, Artificial Sequence
  Synthetic Sequence
atgagtggcc

SEQ ID NO: 10272 - DNA, 10 bp, Artificial Sequence
  Synthetic Sequence
gcaatgccgc

SEQ ID NO: 10273 - DNA, 10 bp, Artificial Sequence
  Synthetic Sequence
atgccacatg

SEQ ID NO: 10274 - DNA, 10 bp, Artificial Sequence
  Synthetic Sequence
cacaggccag

SEQ ID NO: 10275 - DNA, 10 bp, Artificial Sequence
  Synthetic Sequence
gcgaagccat

SEQ ID NO: 10276 - DNA, 10 bp, Artificial Sequence
  Synthetic Sequence
gatctgcggg

SEQ ID NO: 10277 - DNA, 10 bp, Artificial Sequence
  Synthetic Sequence
gagcctgaaa

SEQ ID NO: 10278 - DNA, 10 bp, Artificial Sequence
  Synthetic Sequence
ctgcgtctga

SEQ ID NO: 10279 - DNA, 10 bp, Artificial Sequence
  Synthetic Sequence
cacagaaccc

SEQ ID NO: 10280 - DNA, 10 bp, Artificial Sequence
  Synthetic Sequence
atcttccgta

SEQ ID NO: 10281 - DNA, 10 bp, Artificial Sequence
  Synthetic Sequence
aggtcagcac

SEQ ID NO: 10282 - DNA, 10 bp, Artificial Sequence
  Synthetic Sequence
agaataatca

SEQ ID NO: 10283 - DNA, 10 bp, Artificial Sequence
  Synthetic Sequence
tctgggtgcc

SEQ ID NO: 10284 - DNA, 10 bp, Artificial Sequence
  Synthetic Sequence
aagttaatcg

SEQ ID NO: 10285 - DNA, 10 bp, Artificial Sequence
  Synthetic Sequence
tggcactcga

SEQ ID NO: 10286 - DNA, 10 bp, Artificial Sequence
  Synthetic Sequence
gaataaacta

SEQ ID NO: 10287 - DNA, 10 bp, Artificial Sequence
  Synthetic Sequence
caagacacca

SEQ ID NO: 10288 - DNA, 10 bp, Artificial Sequence
  Synthetic Sequence
acgtgttgtt

SEQ ID NO: 10289 - DNA, 10 bp, Artificial Sequence
  Synthetic Sequence
cagctaggct

SEQ ID NO: 10290 - DNA, 10 bp, Artificial Sequence
  Synthetic Sequence
gtcaaggtag

SEQ ID NO: 10291 - DNA, 10 bp, Artificial Sequence
  Synthetic Sequence
ggtgaagcta

SEQ ID NO: 10292 - DNA, 10 bp, Artificial Sequence
  Synthetic Sequence
ccacgctaga

SEQ ID NO: 10293 - DNA, 10 bp, Artificial Sequence
  Synthetic Sequence
gctggaaatg

SEQ ID NO: 10294 - DNA, 10 bp, Artificial Sequence
  Synthetic Sequence
ctagcggtcc

SEQ ID NO: 10295 - DNA, 10 bp, Artificial Sequence
  Synthetic Sequence
accgtttgga

SEQ ID NO: 10296 - DNA, 10 bp, Artificial Sequence
  Synthetic Sequence
cgacagaacg

SEQ ID NO: 10297 - DNA, 10 bp, Artificial Sequence
  Synthetic Sequence
gctgccgatc

SEQ ID NO: 10298 - DNA, 10 bp, Artificial Sequence
  Synthetic Sequence
caactcttgc

SEQ ID NO: 10299 - DNA, 10 bp, Artificial Sequence
  Synthetic Sequence
gtatgccgaa

SEQ ID NO: 10300 - DNA, 10 bp, Artificial Sequence
  Synthetic Sequence
atgggcgtta

SEQ ID NO: 10301 - DNA, 10 bp, Artificial Sequence
  Synthetic Sequence
ttgaaatcta

SEQ ID NO: 10302 - DNA, 10 bp, Artificial Sequence
  Synthetic Sequence
tctaggaaat

SEQ ID NO: 10303 - DNA, 10 bp, Artificial Sequence
  Synthetic Sequence
tagtcatgag

SEQ ID NO: 10304 - DNA, 10 bp, Artificial Sequence
  Synthetic Sequence
atggtccgcg

SEQ ID NO: 10305 - DNA, 10 bp, Artificial Sequence
  Synthetic Sequence
tgaaagcttc

SEQ ID NO: 10306 - DNA, 10 bp, Artificial Sequence
  Synthetic Sequence
caaacagatc

SEQ ID NO: 10307 - DNA, 10 bp, Artificial Sequence
  Synthetic Sequence
atagtctgct

SEQ ID NO: 10308 - DNA, 10 bp, Artificial Sequence
  Synthetic Sequence
caaattaggg

SEQ ID NO: 10309 - DNA, 10 bp, Artificial Sequence
  Synthetic Sequence
aggcagtcca

SEQ ID NO: 10310 - DNA, 10 bp, Artificial Sequence
  Synthetic Sequence
cgcctggaac

SEQ ID NO: 10311 - DNA, 10 bp, Artificial Sequence
  Synthetic Sequence
caaccgttat

SEQ ID NO: 10312 - DNA, 10 bp, Artificial Sequence
  Synthetic Sequence
actctaacgt

SEQ ID NO: 10313 - DNA, 10 bp, Artificial Sequence
  Synthetic Sequence
agtggacgga

SEQ ID NO: 10314 - DNA, 10 bp, Artificial Sequence
  Synthetic Sequence
tcttaaaggc

SEQ ID NO: 10315 - DNA, 10 bp, Artificial Sequence
  Synthetic Sequence
atggaacagc

SEQ ID NO: 10316 - DNA, 10 bp, Artificial Sequence
  Synthetic Sequence
tacccacagg

SEQ ID NO: 10317 - DNA, 10 bp, Artificial Sequence
  Synthetic Sequence
ccttgaaagt

SEQ ID NO: 10318 - DNA, 10 bp, Artificial Sequence
  Synthetic Sequence
gcagtgctcc

SEQ ID NO: 10319 - DNA, 10 bp, Artificial Sequence
  Synthetic Sequence
cgtaaacgtc

SEQ ID NO: 10320 - DNA, 10 bp, Artificial Sequence
  Synthetic Sequence
attggtaacc

SEQ ID NO: 10321 - DNA, 10 bp, Artificial Sequence
  Synthetic Sequence
gcggcgttag

SEQ ID NO: 10322 - DNA, 10 bp, Artificial Sequence
  Synthetic Sequence
ttatttacgc

SEQ ID NO: 10323 - DNA, 10 bp, Artificial Sequence
  Synthetic Sequence
gagaacactc

SEQ ID NO: 10324 - DNA, 10 bp, Artificial Sequence
  Synthetic Sequence
taagcctgag

SEQ ID NO: 10325 - DNA, 10 bp, Artificial Sequence
  Synthetic Sequence
acgtggtcga

SEQ ID NO: 10326 - DNA, 10 bp, Artificial Sequence
  Synthetic Sequence
ggtgtagtgg

SEQ ID NO: 10327 - DNA, 10 bp, Artificial Sequence
  Synthetic Sequence
catataatta

SEQ ID NO: 10328 - DNA, 10 bp, Artificial Sequence
  Synthetic Sequence
gatcgggttt

SEQ ID NO: 10329 - DNA, 10 bp, Artificial Sequence
  Synthetic Sequence
caacctgcga

SEQ ID NO: 10330 - DNA, 10 bp, Artificial Sequence
  Synthetic Sequence
ccaccgacca

SEQ ID NO: 10331 - DNA, 10 bp, Artificial Sequence
  Synthetic Sequence
ggataggctg

SEQ ID NO: 10332 - DNA, 10 bp, Artificial Sequence
  Synthetic Sequence
aactacaatt

SEQ ID NO: 10333 - DNA, 10 bp, Artificial Sequence
  Synthetic Sequence
atagttcatc

SEQ ID NO: 10334 - DNA, 10 bp, Artificial Sequence
  Synthetic Sequence
caaattctca

SEQ ID NO: 10335 - DNA, 10 bp, Artificial Sequence
  Synthetic Sequence
agccttcgtc

SEQ ID NO: 10336 - DNA, 10 bp, Artificial Sequence
  Synthetic Sequence
acaacagctt

SEQ ID NO: 10337 - DNA, 10 bp, Artificial Sequence
  Synthetic Sequence
tcatgtatgg

SEQ ID NO: 10338 - DNA, 10 bp, Artificial Sequence
  Synthetic Sequence
tccgggagtt

SEQ ID NO: 10339 - DNA, 10 bp, Artificial Sequence
  Synthetic Sequence
tggactccgg

SEQ ID NO: 10340 - DNA, 10 bp, Artificial Sequence
  Synthetic Sequence
ctgccatata

SEQ ID NO: 10341 - DNA, 10 bp, Artificial Sequence
  Synthetic Sequence
tccaatgtaa

SEQ ID NO: 10342 - DNA, 10 bp, Artificial Sequence
  Synthetic Sequence
tgccacaggt

SEQ ID NO: 10343 - DNA, 10 bp, Artificial Sequence
  Synthetic Sequence
aggattagag

SEQ ID NO: 10344 - DNA, 10 bp, Artificial Sequence
  Synthetic Sequence
tagtgcatct

SEQ ID NO: 10345 - DNA, 10 bp, Artificial Sequence
  Synthetic Sequence
gataagtaac

SEQ ID NO: 10346 - DNA, 10 bp, Artificial Sequence
  Synthetic Sequence
gtatcggtac

SEQ ID NO: 10347 - DNA, 10 bp, Artificial Sequence
  Synthetic Sequence
ctactgatga

SEQ ID NO: 10348 - DNA, 10 bp, Artificial Sequence
  Synthetic Sequence
agattaacta

SEQ ID NO: 10349 - DNA, 10 bp, Artificial Sequence
  Synthetic Sequence
agcttggtgg

SEQ ID NO: 10350 - DNA, 10 bp, Artificial Sequence
  Synthetic Sequence
ggtagcagaa

SEQ ID NO: 10351 - DNA, 10 bp, Artificial Sequence
  Synthetic Sequence
tcgctcgcca

SEQ ID NO: 10352 - DNA, 10 bp, Artificial Sequence
  Synthetic Sequence
ggaatttgta

SEQ ID NO: 10353 - DNA, 10 bp, Artificial Sequence
  Synthetic Sequence
ctttacgtaa

SEQ ID NO: 10354 - DNA, 10 bp, Artificial Sequence
  Synthetic Sequence
gtatgacaat

SEQ ID NO: 10355 - DNA, 10 bp, Artificial Sequence
  Synthetic Sequence
gggttccgag

SEQ ID NO: 10356 - DNA, 10 bp, Artificial Sequence
  Synthetic Sequence
ctctaaacat

SEQ ID NO: 10357 - DNA, 10 bp, Artificial Sequence
  Synthetic Sequence
gactttctta

SEQ ID NO: 10358 - DNA, 10 bp, Artificial Sequence
  Synthetic Sequence
cgagcaaccc

SEQ ID NO: 10359 - DNA, 10 bp, Artificial Sequence
  Synthetic Sequence
gcccactcca

SEQ ID NO: 10360 - DNA, 10 bp, Artificial Sequence
  Synthetic Sequence
tcggctttgc

SEQ ID NO: 10361 - DNA, 10 bp, Artificial Sequence
  Synthetic Sequence
cagctcacgc

SEQ ID NO: 10362 - DNA, 10 bp, Artificial Sequence
  Synthetic Sequence
tatgaccttc

SEQ ID NO: 10363 - DNA, 10 bp, Artificial Sequence
  Synthetic Sequence
ccagaggttg

SEQ ID NO: 10364 - DNA, 10 bp, Artificial Sequence
  Synthetic Sequence
gctaccgcct

SEQ ID NO: 10365 - DNA, 10 bp, Artificial Sequence
  Synthetic Sequence
gcggagcgtt

SEQ ID NO: 10366 - DNA, 10 bp, Artificial Sequence
  Synthetic Sequence
gtcgaattcg

SEQ ID NO: 10367 - DNA, 10 bp, Artificial Sequence
  Synthetic Sequence
tagtgcaatg

SEQ ID NO: 10368 - DNA, 10 bp, Artificial Sequence
  Synthetic Sequence
tatgagacta

SEQ ID NO: 10369 - DNA, 10 bp, Artificial Sequence
  Synthetic Sequence
caagttagtc

SEQ ID NO: 10370 - DNA, 10 bp, Artificial Sequence
  Synthetic Sequence
agtttactcg

SEQ ID NO: 10371 - DNA, 10 bp, Artificial Sequence
  Synthetic Sequence
ctgctacttc

SEQ ID NO: 10372 - DNA, 10 bp, Artificial Sequence
  Synthetic Sequence
caccgcataa

SEQ ID NO: 10373 - DNA, 10 bp, Artificial Sequence
  Synthetic Sequence
ccagattgag

SEQ ID NO: 10374 - DNA, 10 bp, Artificial Sequence
  Synthetic Sequence
tcctaactga

SEQ ID NO: 10375 - DNA, 10 bp, Artificial Sequence
  Synthetic Sequence
atcgagcatc

SEQ ID NO: 10376 - DNA, 10 bp, Artificial Sequence
  Synthetic Sequence
cagcagcgtt

SEQ ID NO: 10377 - DNA, 10 bp, Artificial Sequence
  Synthetic Sequence
acttggaggc

SEQ ID NO: 10378 - DNA, 10 bp, Artificial Sequence
  Synthetic Sequence
agggagctcg

SEQ ID NO: 10379 - DNA, 10 bp, Artificial Sequence
  Synthetic Sequence
cgtgatcaca

SEQ ID NO: 10380 - DNA, 10 bp, Artificial Sequence
  Synthetic Sequence
ctatagtgca

SEQ ID NO: 10381 - DNA, 10 bp, Artificial Sequence
  Synthetic Sequence
ttcctttatc

SEQ ID NO: 10382 - DNA, 10 bp, Artificial Sequence
  Synthetic Sequence
ttggtcattt

SEQ ID NO: 10383 - DNA, 10 bp, Artificial Sequence
  Synthetic Sequence
tcccagtcga

SEQ ID NO: 10384 - DNA, 10 bp, Artificial Sequence
  Synthetic Sequence
agtggcattt

SEQ ID NO: 10385 - DNA, 10 bp, Artificial Sequence
  Synthetic Sequence
taactagggt

SEQ ID NO: 10386 - DNA, 10 bp, Artificial Sequence
  Synthetic Sequence
ggcgatcatt

SEQ ID NO: 10387 - DNA, 10 bp, Artificial Sequence
  Synthetic Sequence
cacagactcg

SEQ ID NO: 10388 - DNA, 10 bp, Artificial Sequence
  Synthetic Sequence
gcctgcacac

SEQ ID NO: 10389 - DNA, 10 bp, Artificial Sequence
  Synthetic Sequence
atgaagttca

SEQ ID NO: 10390 - DNA, 10 bp, Artificial Sequence
  Synthetic Sequence
gttcatatcg

SEQ ID NO: 10391 - DNA, 10 bp, Artificial Sequence
  Synthetic Sequence
gctgaagccc

SEQ ID NO: 10392 - DNA, 10 bp, Artificial Sequence
  Synthetic Sequence
tgggtcaccg

SEQ ID NO: 10393 - DNA, 10 bp, Artificial Sequence
  Synthetic Sequence
attctgacga

SEQ ID NO: 10394 - DNA, 10 bp, Artificial Sequence
  Synthetic Sequence
gggtaatctc

SEQ ID NO: 10395 - DNA, 10 bp, Artificial Sequence
  Synthetic Sequence
gaaacttaat

SEQ ID NO: 10396 - DNA, 10 bp, Artificial Sequence
  Synthetic Sequence
gaggagagaa

SEQ ID NO: 10397 - DNA, 10 bp, Artificial Sequence
  Synthetic Sequence
gttacaggaa

SEQ ID NO: 10398 - DNA, 10 bp, Artificial Sequence
  Synthetic Sequence
ggcggaataa

SEQ ID NO: 10399 - DNA, 10 bp, Artificial Sequence
  Synthetic Sequence
caatctagac

SEQ ID NO: 10400 - DNA, 10 bp, Artificial Sequence
  Synthetic Sequence
taaagtatgt

SEQ ID NO: 10401 - DNA, 10 bp, Artificial Sequence
  Synthetic Sequence
tattgtggat

SEQ ID NO: 10402 - DNA, 10 bp, Artificial Sequence
  Synthetic Sequence
gtcggctaac

SEQ ID NO: 10403 - DNA, 10 bp, Artificial Sequence
  Synthetic Sequence
ccatcgccag

SEQ ID NO: 10404 - DNA, 10 bp, Artificial Sequence
  Synthetic Sequence
gggaagaccg

SEQ ID NO: 10405 - DNA, 29 bp, Artificial Sequence
  Synthetic Sequence
aatgatacggcgaccaccgagatctacac

SEQ ID NO: 10406 - DNA, 24 bp, Artificial Sequence
  Synthetic Sequence
atctcgtatgccgtcttctgcttg
